United States Patent Application Publication US 2012/0227134 A1 - sequence listing, part 5

SEQ ID NO: 13607 - DNA, 2358 bp, Schizosaccharomyces pombe
  CDS (1)..(2358)
atgcagcggtcagcgaagttaaaaattcgagcgccacgaaaattttctgctaaccaagtagactttgctacacattgggaagtcttgcagcgagctattggggatatatttcagaaaagcacatctcaattatcgtttgaagagttgtatagaaatgcatatatacttgttctacataagtatggagaaaagctttataatcatgtacaggatgttattagatcgaggcttaaagaagaaactgttccagctatttacaaaaactatgacgcttccttattagggaatgctctattggatattagaaaaaatgattcctattctacttcatggtcgagatcattggaagcggctcatagatttttatcgtctttagttaattcctggaaggatcacattgtttcaatgcaaatgatatctagtgtattaaaatatttggacaaggtttattcaaaatctgcagacaaagttcctgttaatgaaaacggaatatatatctttcgtgaagttgttttgttaaatagttttgaaattggagagaaatgtgtcgaaactattctaattctggtttatcttgaacgtaaagggaatacaataaatcgacccttaataaatgactgcttagatatgctaaactctttgccttcagaaaacaaaaaggaaactctttatgatgttttatttgctccaaagtttttatcttacacaagaaatttctatgaaatagaatcatcaacagtcatcggcgtatttggagttgtggagtatctgaaaaaagcagagaaaagatttgaggaagaaaaggagaggtccaagaattacctgttcacaaaaatagctagcccccttctatccgttgttgaagatgagcttttgagtaaacatttggacgatttgcttgaaaatcaatcaactggctttttctcgatgatcgactcttcaaacttcgagggtcttcaattggtttacgaaagcttttctagagtggaacttggcgtgaagtctttaaaaaaatacttggcgaaatatgtagcgcatcatggaaaattaatcaatgaaactactagccaagcgcttgaaggaaagatggctgttggtcgtctatcatctaatgctacaatggcaacattatgggttcaaaaagttttggccttatgggatagactaaatacaattataagtactactatggatgctgatcggtctatcttgaactctttatcagatgcttttgttacgttcgtagacggatatacccgagcccccgagtacatttcactattcattgatgacaatctgaaaaaagatgctagaaaagcaatagaaggctctattgaagcaacacttcaaaattctgttacgttatttcggtttatttcagaaaaagatgtttttgaaaaatattacaaaacacaccttgcaaaaaggttgttgaataatcgatcaatatcttccgatgcagagctcggaatgatcagtaggctgaaacaagaagctggtaatgtttttactcaaaagctcgaaggaatgtttaatgatatgaatctttcacaagaattgttacaggagtacaaacataattctgcgttacagtcggccaagcctgctttggacttaaacgtttcaattttggcttctacattttggcccatcgatttatcgcctcacaaaattaaatgtaactttccgaaagttctcctggctcagatagatcaatttacggatttttatttatcgaaacatacggggagaaaattattgtggtatccttctatgggaagtgctgatgtccgtgttaatttcaaagacagaaaatatgacttgaatgtatcgactattgcatctgttattctattgcttttccaagacctaaaagaaaatcagtgtttaatttttgaggagattttggaaaaaaccaatatagaagttggggatttgaagcgcaatcttcagtcccttgcttgtgcaaaatacaagattttgctaaaggatccaaaaggaagggaggtgaatgcaggtgacaagttttatttcaatgagaactttgtttcaaatctcgcccggattaaaatatcgacagttgctcagactcgtgttgaggatgatagtgagagaaaacgtacattagagaaggtagacgagtcaaggaagcatcaagcagatgcctgtattgttagagtgatgaaggatcgcaaagtgtgcgaacacaatcagctgatggcagaggttacaagacagttaaaccctcgtttccaccctagtccgatgatgattaagcgacgaattgaagctttaatagagcgggagtacctacaaagacaagccgataatggtcgcatttatgaatatttagcatag

SEQ ID NO: 13608 - protein, 785 aa, Schizosaccharomyces pombe
MQRSAKLKIRAPRKFSANQVDFATHWEVLQRAIGDIFQKSTSQLSFEELYRNAYILVLHKYGEKLYNHVQDVIRSRLKEETVPAIYKNYDASLLGNALLDIRKNDSYSTSWSRSLEAAHRFLSSLVNSWKDHIVSMQMISSVLKYLDKVYSKSADKVPVNENGIYIFREVVLLNSFEIGEKCVETILILVYLERKGNTINRPLINDCLDMLNSLPSENKKETLYDVLFAPKFLSYTRNFYEIESSTVIGVFGVVEYLKKAEKRFEEEKERSKNYLFTKIASPLLSVVEDELLSKHLDDLLENQSTGFFSMIDSSNFEGLQLVYESFSRVELGVKSLKKYLAKYVAHHGKLINETTSQALEGKMAVGRLSSNATMATLWVQKVLALWDRLNTIISTTMDADRSILNSLSDAFVTFVDGYTRAPEYISLFIDDNLKKDARKAIEGSIEATLQNSVTLFRFISEKDVFEKYYKTHLAKRLLNNRSISSDAELGMISRLKQEAGNVFTQKLEGMFNDMNLSQELLQEYKHNSALQSAKPALDLNVSILASTFWPIDLSPHKIKCNFPKVLLAQIDQFTDFYLSKHTGRKLLWYPSMGSADVRVNFKDRKYDLNVSTIASVILLLFQDLKENQCLIFEEILEKTNIEVGDLKRNLQSLACAKYKILLKDPKGREVNAGDKFYFNENFVSNLARIKISTVAQTRVEDDSERKRTLEKVDESRKHQADACIVRVMKDRKVCEHNQLMAEVTRQLNPRFHPSPMMIKRRIEALIEREYLQRQADNGRIYEYLA

SEQ ID NO: 13609 - DNA, 2304 bp, Schizosaccharomyces pombe
  CDS (1)..(2304)
atgactactttgaataccaacgataaagacctcccgattgttaaaaaatatgattcattgaatggaacttgggactttttaaaaacaggtgtgtcccaaatatttgaaaggctagatgaaggaatgactatcactaagtatatggagctttatacagcaatccataactactgtgctgatgcgtccaaaactataacggtggacaatttcaacgatcaaactgcaaacgttttaggcgaagccctttacaataatttggttctatatctggaagagtatttggcccgtctgcgaaaggaatgcatttcgcaaacgaatcatgaagagcaactcgctgcgtatgccaagtattggacgcgatttacaacatctgcccgttttatcaaccatctttttggatatttaaatagatattgggttaaactgaagaacagatttactgagacactcgtgtacgacatttacacactttgtcttgtgtcatggcatcatcacgttttttcccacattcgcgatagcctacttcaaaatttgttatacatgttcaccaaaaaaagattatatgaacctactgatatgaaatatgtggaagtttgtgtggattctatcacttcattgagctttgataaaaccgatatgacaaagcctaacttgagctcatacaaaacttttttcgaaacaaactttattgaaaatacaaaaaacttttatgcaaaggagtcttccgaatacttggcttcccattctattacggattacttaaaaaaggcagaaataagactagcagaggaggaagagcttgtgagattatatttgcatgaatccacattgaagccgcttttagaagcgactgaagatgtactaattgcacaacatgaagaagttttgcacaacgactttgcacgcatgctcgaccaaaactgcagtgaggatatcattcgcatgtaccgattgatgtctcgaacacctaatgggttgcagcctttacgccagacatttgaggagtttgtcaagagatcaggctttgctgcggttgccaaaattgttccccaggtcggtggagaagccgatgtggatcctaaagagtatatggaaatgttactttccacgtataaagcttccaaagaacttgttaacaccgcatttcatggggatactgattttacaaagtcattggatacagcctttagagaacttgtcaatcgaaatgttgtttgccagcgctcttcctctcgctccccagagttgcttgctaaatacgccgacagtattttgcgaaaaagcaacaagaatgttgacattgatgatgttgaagactgtttatcgtcgattatcattatttttcgttatgtcgaagacaaggatgtttttcaaaacttttatactaagcttttagccaagcgacttgtgaatggtacctctaattcccaggatgctgaatctagcatgctatctaagttaaaggaagtctgcggttttgaatatactagtaagctacagcgtatgtttcaagacatctccttgtctcaagagattaccgaagcgttttggcaactccctcagtcacgtgctggaaatatagatttctctgctcttgtacttggtacatcgttttggcctctatctcccaacaatgtgaactttcatctgccagaggaattagttcctttgtatgaaggattccaaaactattactatagctgccataacggaaggaagttaagctggttgttccatctctctaaaggagaaataaaggcacgcattaaccctcaaactaatgtcacttatgtgtttcaagtttctacatatcaaatgggtgttttgcttttgtacaaccatcgcgattcttatacatatgaggagctggcaaaaataactgggttaagtacagatttcttgacagggattctgaacatattcctaaaagcaaaggtgcttctccttggcgacaatgacaagcttggtgatcctaatagcacatataagatcaatgaaaattttaggatgaaaaagatacgggtacagttaaatctcccaattagatctgagcaaaagcaggaatctctggagactcataaaactatagaagaagatcgaaagttactgcttcaatccgctatcgtccgtatcatgaaggctcgccgaacattgaaacatgtagtgttagtgaaagagactattgatcaaattaaaagcagatttactcctaaagtgtctgatattaagcaatgtatagatatgttaatcgaaaaagagtacctggaacgccaaggccgcgatgaatacatttaccttgcttga

SEQ ID NO: 13610 - protein, 767 aa, Schizosaccharomyces pombe
MTTLNTNDKDLPIVKKYDSLNGTWDFLKTGVSQIFERLDEGMTITKYMELYTAIHNYCADASKTITVDNFNDQTANVLGEALYNNLVLYLEEYLARLRKECISQTNHEEQLAAYAKYWTRFTTSARFINHLFGYLNRYWVKLKNRFTETLVYDIYTLCLVSWHHHVFSHIRDSLLQNLLYMFTKKRLYEPTDMKYVEVCVDSITSLSFDKTDMTKPNLSSYKTFFETNFIENTKNFYAKESSEYLASHSITDYLKKAEIRLAEEEELVRLYLHESTLKPLLEATEDVLIAQHEEVLHNDFARMLDQNCSEDIIRMYRLMSRTPNGLQPLRQTFEEFVKRSGFAAVAKIVPQVGGEADVDPKEYMEMLLSTYKASKELVNTAFHGDTDFTKSLDTAFRELVNRNVVCQRSSSRSPELLAKYADSILRKSNKNVDIDDVEDCLSSIIIIFRYVEDKDVFQNFYTKLLAKRLVNGTSNSQDAESSMLSKLKEVCGFEYTSKLQRMFQDISLSQEITEAFWQLPQSRAGNIDFSALVLGTSFWPLSPNNVNFHLPEELVPLYEGFQNYYYSCHNGRKLSWLFHLSKGEIKARINPQTNVTYVFQVSTYQMGVLLLYNHRDSYTYEELAKITGLSTDFLTGILNIFLKAKVLLLGDNDKLGDPNSTYKINENFRMKKIRVQLNLPIRSEQKQESLETHKTIEEDRKLLLQSAIVRIMKARRTLKHVVLVKETIDQIKSRFTPKVSDIKQCIDMLIEKEYLERQGRDEYIYLA

SEQ ID NO: 13611 - DNA, 2466 bp, Drosophila melanogaster
  CDS (1)..(2466)
atgagtgcggccaagaagtacaagcccatggacacaactgagctgcacgagaacacagagaatattgccgcctgcctgaagaaggccgagaacgtcgcccccaccgctgctgccgcctcgagcgtgggccgcagtgccttcgctgcccaaaacatgaattctgcgtccaccaacggcgagcgcctgccaaacttctccaagctaggcggcagccatggcgagatccgcacggcttcaactacctcaaatctcctcaatcgcatgggggctattcacaacagcaagcctggcgatgtcaagaagatagtgattaagaactttaaggataagcctacactgcccgataactattccaaggacacgtacgtgaagcttgaagaagccgttatcgccatccaactctccaagcccattaaatattcgctggaggagctctaccaggcggtggtgaacatgtgtagccacaagatggatgcacaattatacgcgaaactcaaggagctaacagagcaacacgtaaagcgcaatattaagctcaaggagctcaccggcggtagcatggacaaactgattttgctggaaaagatcaaccactggtggctctcgttctgccaacaaatgatcatgattcgcagcatattcttgtatatggatcgaacttatgtgctgcaaaattcgaccgttcactcgatttgggacatggggctggacctttttcgcatccattttgctcaaaacagcgttgtccaaaagcgaaccgtcgacggtttactaacgcttattgaaaaagaacgacaaggctccaccgtggaccgtggtttgctgaagagcttggttcgcatgttatgcgacctgcagatctacaccagctcctttgaggagaagttcctcgacgcaaccaatcaattgtataaggctgagagtcaacgcaagatgcaagaactggaagttcccgagtacttacaacacgtcaacaagcgtttggccgaggagaacgagcgtttgcgtcactatctggactcgagcaccaaacatccactgatttacaatgtggaaaaagagttacttgccgaacacctaacgtcaatattgcagaagggcttggattcattgttggaagacaacagactgagtgaccttacactgttgtacgggctgcttagtcgagtcaaaaatggaacatccgagctgtgcggcaatttcaacggtttcattaagaaaaagggacgcaccattgtcatcgatcccgagaaggataagagcatggtccaagatttgctcgatttcaaggacaaaatggatgtgatagttcgcacctgctttgagcacaatgagaaattcacaaactcgttgcgcgaggcctttgagttctttatcaaccaacgtgccaacaagccggccgagcttattgctaaatacgtagatatgaaactgcgatctggcaacaagggaaccacagatgaggagttggaaaagactctagataaaatcatggttctgtttcgttttatacatggcaaagatgtatttgaagcgttttacaaaaaggacttggccaaacgattacttgtgggcaaatcggcatcagtggattccgaaaagagtatgctctccaagcttaagcaggagtgcggtggagggtttacgtccaagctggagggcatgtttaaggacatggaactgagccgagatatcaacattgcgttccgcggacacgcgttaagcaacaaccgcgatgtccacaacttggacttgtgcgtcagcattcttaccatgggctactggcctacatatgcacctacagaggtcacaatgccgccacagttcatcaatcctcagcagattttcaacaaattttatctggaaaagcatagtgggcggaagttgcagtggcagcctacattaggaaattgtatgctgcgtgctcaattcgatgcgggaccgaaagaattgttggtctcgctgtttcaagcgcttgtgcttctattgtttaacgataagccagttctgagctacgaggagatattggccgccaccctcatcgaggatggagagttgcgtcgaacacttcagtccctggcttgtgggcgcgcccgcgtcataacaaaaacaccgaaaggccgcgaaatcttggatggcgatcagtttgattttaacaatgagttcacaaacaaattgtttagaatcaagatcaaccaaatacagatgaaggagacaaatgaggagcaaaaggcgacggaggagcgtgtgtttcaggatcgtcagtatcaaattgatgcggctattgtgcgcattatgaaaatgcgaaaaacgctgagccataatcttctcatcaccgagctgttcaaccagcttaccttccctgtcaagcccgctgacctaaagaagcgaatcgagtcgctcatcgaccgcgactacatggagcgagacaaggataatcaaaaccaatacaactatgtggcataa

SEQ ID NO: 13612 - protein, 821 aa, Drosophila melanogaster
MSAAKKYKPMDTTELHENTENIAACLKKAENVAPTAAAASSVGRSAFAAQNMNSASTNGERLPNFSKLGGSHGEIRTASTTSNLLNRMGAIHNSKPGDVKKIVIKNFKDKPTLPDNYSKDTYVKLEEAVIAIQLSKPIKYSLEELYQAVVNMCSHKMDAQLYAKLKELTEQHVKRNIKLKELTGGSMDKLILLEKINHWWLSFCQQMIMIRSIFLYMDRTYVLQNSTVHSIWDMGLDLFRIHFAQNSVVQKRTVDGLLTLIEKERQGSTVDRGLLKSLVRMLCDLQIYTSSFEEKFLDATNQLYKAESQRKMQELEVPEYLQHVNKRLAEENERLRHYLDSSTKHPLIYNVEKELLAEHLTSILQKGLDSLLEDNRLSDLTLLYGLLSRVKNGTSELCGNFNGFIKKKGRTIVIDPEKDKSMVQDLLDFKDKMDVIVRTCFEHNEKFTNSLREAFEFFINQRANKPAELIAKYVDMKLRSGNKGTTDEELEKTLDKIMVLFRFIHGKDVFEAFYKKDLAKRLLVGKSASVDSEKSMLSKLKQECGGGFTSKLEGMFKDMELSRDINIAFRGHALSNNRDVHNLDLCVSILTMGYWPTYAPTEVTMPPQFINPQQIFNKFYLEKHSGRKLQWQPTLGNCMLRAQFDAGPKELLVSLFQALVLLLFNDKPVLSYEEILAATLIEDGELRRTLQSLACGRARVITKTPKGREILDGDQFDFNNEFTNKLFRIKINQIQMKETNEEQKATEERVFQDRQYQIDAAIVRIMKMRKTLSHNLLITELFNQLTFPVKPADLKKRIESLIDRDYMERDKDNQNQYNYVA

SEQ ID NO: 13613 - DNA, 2322 bp, Drosophila melanogaster
  CDS (1)..(2322)
atgaatctgcggggaaatcctcccaagaaggagggcaaaatgcgcattcgggcctttccggcctccatggacgagaagtacgtggagaccatttgggccagcttaaagaatgctatccaggagatacagaaaaagaacaactccggactatcgtttgaacaactctaccggaatgcgtacaacatggtgctgcataagcacggcaatagactgtattacggtctgagggaggtcgtctcagaacacctggagcacaaggtgcgggcggatgtgctggaggctctgcacagcaatttcctacccaagttaaaccaggcctggacagaccaccagacatctatggtgatgatccgcgacatactcatgtacatggatagagtttatgtgcagcagcgcgaggtagacaatgtgtacaatttgggattaattttgttcagggatcaggtggttcgctattctgagattcaaaaggccctgcgagagaagttgctgggcatggtgatggaggaacgtcatggcgaagccattaaccatctggctatcaagaatgcttgcagtatgctgatcaccctggggattaactcgcgcactgtctacgaagaggactttgaaaagcccttccttgcgcaatcggcggcgttttacaaattcgagtcgcagaactttcttgccgagaacaacgctggcgtttacatcaagaaagtggaagcgcgcatcacggaggaatcttcccgggcagcgctgtatctcgataaggatacggagccccgcattgtgcgcgtggtcgaagaagagctgatcaaaaagcacatgcgacccattgttgaaatggagaactcgggcgtggtgtacatgatcaagaactcaaagaccgaggatctggcctgcacatataagcttttctcgcgcctgaaggaggagggtctcaaggtgatagcggacacaatgtcggcatatctgcgagagcaaggacgcatgctggttaaggaagaagaaaacggcaacacgaatcccataacattcgtgcagaacttgctggatctcaaggaccgcttcgaccagtttctggtgcactcgttcgccaacgatcgcatattcaaaaacgtcatctcatccgattttgaacatttcttgaacctaaataacaaatccccggagtatctatcgctattcatcgatgacaaactgaaaaagggtggcaagggaatgagcgaacaggaaattgagtccatcttggataagacaatggttctcttccgtttcctattggagaaagatgtctttgagcgctattacaagacgcatttagccaagagattgctgctgaacaaatcagtctctgatgatttcgagaagaatatgatatcaaaactaaagactgaatgcggctgtcaattcacctcgaagctagagggcatgtttaaagatatgtcagtctccaatacgatcatggatgagtttaagaactttgtaaataataacaatttatcccttggcggtgtggagctaacggtacgcatactaaccactggtttttggcccacacagacagcaactccgaactgcaatatacccgccgctccgcgtgaagcctttgacattttcaagaacttctatctaaataagcactcaggacgtcaattgacgttacagccacaaatgggaaccgcctatatcaacgctgtgttttatggccgcaaggcagttgaaagtgaaaaggataaagatgcacccagctccagttcaagcggctgtggggtgcccaccaccacacgcaagcacatattgcaagtgtccacgtaccagatgtgtgtgctactgctgtttaataaccgcgacgtgctcacctacgatgacatacaccaggagaccgatataccggaacgggagctcgtccgagcactacaatcgttgtccatgggcaaacccgctcagcgtttgttagtacgcaattctaaaacgaaaactaaggacattgagcccacggatgagttttacgtaaacgacgccttcaactccaagttccacagggtgaagatacaaacggtagccgccaagggagaatcagagccagagcgtaaggaaacgcgcggaaaggtcgacgaggatcgtaagcacgagatcgaagcggctattgtgcgcataatgaaggcccgcaagcgtctggctcacaacttgctagtatcagatgtgacgtcgcagctaaagtcgcgtttcttgccctcgcccgtgtttatcaaaaagcgcattgagggcctaatcgagcgcgagtatctgcaacgatcgccggaagatcgcaaagtgtacaactacttggcctaa

SEQ ID NO: 13614 - protein, 773 aa, Drosophila melanogaster
MNLRGNPPKKEGKMRIRAFPASMDEKYVETIWASLKNAIQEIQKKNNSGLSFEQLYRNAYNMVLHKHGNRLYYGLREVVSEHLEHKVRADVLEALHSNFLPKLNQAWTDHQTSMVMIRDILMYMDRVYVQQREVDNVYNLGLILFRDQVVRYSEIQKALREKLLGMVMEERHGEAINHLAIKNACSMLITLGINSRTVYEEDFEKPFLAQSAAFYKFESQNFLAENNAGVYIKKVEARITEESSRAALYLDKDTEPRIVRVVEEELIKKHMRPIVEMENSGVVYMIKNSKTEDLACTYKLFSRLKEEGLKVIADTMSAYLREQGRMLVKEEENGNTNPITFVQNLLDLKDRFDQFLVHSFANDRIFKNVISSDFEHFLNLNNKSPEYLSLFIDDKLKKGGKGMSEQEIESILDKTMVLFRFLLEKDVFERYYKTHLAKRLLLNKSVSDDFEKNMISKLKTECGCQFTSKLEGMFKDMSVSNTIMDEFKNFVNNNNLSLGGVELTVRILTTGFWPTQTATPNCNIPAAPREAFDIFKNFYLNKHSGRQLTLQPQMGTAYINAVFYGRKAVESEKDKDAPSSSSSGCGVPTTTRKHILQVSTYQMCVLLLFNNRDVLTYDDIHQETDIPERELVRALQSLSMGKPAQRLLVRNSKTKTKDIEPTDEFYVNDAFNSKFHRVKIQTVAAKGESEPERKETRGKVDEDRKHEIEAAIVRIMKARKRLAHNLLVSDVTSQLKSRFLPSPVFIKKRIEGLIEREYLQRSPEDRKVYNYLA

SEQ ID NO: 13615 - DNA, 2805 bp, Drosophila melanogaster
  CDS (1)..(2805)
atgcaaggccgcgatccccgccaacagcagccggagccactgaacaacctcaacgccaacggccgctaccacaatcgcatggtggccggctccaacaacttcaatggcgcaactgtcggtaatgtggactctgccgtgccttgccggattgcaaggcaaaacgttcttggacagcaggcgcgaagcatgaacatcaatgtgcccaacgcctcctcaatgcagcaacaccagcagtcccaaaatcgattgtccgctcagggattagcttctgcctcgcggcggagttatcaccttgccgccagcggtggcagagttcgggctgataacagaattaatactaaccacccgctcacgccgacgccactttccatgccagttccagctcctgctgctccagctgtcgttaaaactgaaactagtgcaaccacctctgggccatcaacctcagcttcagcgagcgcagaaagtacagaaaaacgctttaaggaaatagcacggaagtacccactctggctaccggagtacaagcgaagggcattcaatgcctccatggacgagaagtacgtggagaccatttgggccagcttaaagaatgctatccaggagatacagaaaaagaacaactccggactatcgtttgaacaactctaccggaatgcgtacaacatggtgctgcataagcacggcaatagactgtattacggtctgagggaggtcgtctcagaacacctggagcacaaggtgcgggcggatgtgctggaggctctgcacagcaatttcctacccaagttaaaccaggcctggacagaccaccagacatctatggtgatgatccgcgacatactcatgtacatggatagagtttatgtgcagcagcgcgaggtagacaatgtgtacaatttgggattaattttgttcagggatcaggtggttcgctattctgagattcaaaaggccctgcgagagaagttgctgggcatggtgatggaggaacgtcatggcgaagccattaaccatctggctatcaagaatgcttgcagtatgctgatcaccctggggattaactcgcgcactgtctacgaagaggactttgaaaagcccttccttgcgcaatcggcggcgttttacaaattcgagtcgcagaactttcttgccgagaacaacgctggcgtttacatcaagaaagtggaagcgcgcatcacggaggaatcttcccgggcagcgctgtatctcgataaggatacggagccccgcattgtgcgcgtggtcgaagaagagctgatcaaaaagcacatgcgacccattgttgaaatggagaactcgggcgtggtgtacatgatcaagaactcaaagaccgaggatctggcctgcacatataagcttttctcgcgcctgaaggaggagggtctcaaggtgatagcggacacaatgtcggcatatctgcgagagcaaggacgcatgctggttaaggaagaagaaaacggcaacacgaatcccataacattcgtgcagaacttgctggatctcaaggaccgcttcgaccagtttctggtgcactcgttcgccaacgatcgcatattcaaaaacgtcatctcatccgattttgaacatttcttgaacctaaataacaaatccccggagtatctatcgctattcatcgatgacaaactgaaaaagggtggcaagggaatgagcgaacaggaaattgagtccatcttggataagacaatggttctcttccgtttcctattggagaaagatgtctttgagcgctattacaagacgcatttagccaagagattgctgctgaacaaatcagtctctgatgatttcgagaagaatatgatatcaaaactaaagactgaatgcggctgtcaattcacctcgaagctagagggcatgtttaaagatatgtcagtctccaatacgatcatggatgagtttaagaactttgtaaataataacaatttatcccttggcggtgtggagctaacggtacgcatactaaccactggtttttggcccacacagacagcaactccgaactgcaatatacccgccgctccgcgtgaagcctttgacattttcaagaacttctatctaaataagcactcaggacgtcaattgacgttacagccacaaatgggaaccgcctatatcaacgctgtgttttatggccgcaaggcagttgaaagtgaaaaggataaagatgcacccagctccagttcaagcggctgtggggtgcccaccaccacacgcaagcacatattgcaagtgtccacgtaccagatgtgtgtgctactgctgtttaataaccgcgacgtgctcacctacgatgacatacaccaggagaccgatataccggaacgggagctcgtccgagcactacaatcgttgtccatgggcaaacccgctcagcgtttgttagtacgcaattctaaaacgaaaactaaggacattgagcccacggatgagttttacgtaaacgacgccttcaactccaagttccacagggtgaagatacaaacggtagccgccaagggagaatcagagccagagcgtaaggaaacgcgcggaaaggtcgacgaggatcgtaagcacgagatcgaagcggctattgtgcgcataatgaaggcccgcaagcgtctggctcacaacttgctagtatcagatgtgacgtcgcagctaaagtcgcgtttcttgccctcgcccgtgtttatcaaaaagcgcattgagggcctaatcgagcgcgagtatctgcaacgatcgccggaagatcgcaaagtgtacaactacttggcctaa

SEQ ID NO: 13616 - protein, 934 aa, Drosophila melanogaster
MQGRDPRQQQPEPLNNLNANGRYHNRMVAGSNNFNGATVGNVDSAVPCRIARQNVLGQQARSMNINVPNASSMQQHQQSQNRLSAQGLASASRRSYHLAASGGRVRADNRINTNHPLTPTPLSMPVPAPAAPAVVKTETSATTSGPSTSASASAESTEKRFKEIARKYPLWLPEYKRRAFNASMDEKYVETIWASLKNAIQEIQKKNNSGLSFEQLYRNAYNMVLHKHGNRLYYGLREVVSEHLEHKVRADVLEALHSNFLPKLNQAWTDHQTSMVMIRDILMYMDRVYVQQREVDNVYNLGLILFRDQVVRYSEIQKALREKLLGMVMEERHGEAINHLAIKNACSMLITLGINSRTVYEEDFEKPFLAQSAAFYKFESQNFLAENNAGVYIKKVEARITEESSRAALYLDKDTEPRIVRVVEEELIKKHMRPIVEMENSGVVYMIKNSKTEDLACTYKLFSRLKEEGLKVIADTMSAYLREQGRMLVKEEENGNTNPITFVQNLLDLKDRFDQFLVHSFANDRIFKNVISSDFEHFLNLNNKSPEYLSLFIDDKLKKGGKGMSEQEIESILDKTMVLFRFLLEKDVFERYYKTHLAKRLLLNKSVSDDFEKNMISKLKTECGCQFTSKLEGMFKDMSVSNTIMDEFKNFVNNNNLSLGGVELTVRILTTGFWPTQTATPNCNIPAAPREAFDIFKNFYLNKHSGRQLTLQPQMGTAYINAVFYGRKAVESEKDKDAPSSSSSGCGVPTTTRKHILQVSTYQMCVLLLFNNRDVLTYDDIHQETDIPERELVRALQSLSMGKPAQRLLVRNSKTKTKDIEPTDEFYVNDAFNSKFHRVKIQTVAAKGESEPERKETRGKVDEDRKHEIEAAIVRIMKARKRLAHNLLVSDVTSQLKSRFLPSPVFIKKRIEGLIEREYLQRSPEDRKVYNYLA

SEQ ID NO: 13617 - DNA, 2295 bp, Aspergillus terreus NIH2624
  CDS (1)..(2295)
atgccggccccaattccgcaaccacctcacaaggataaccttgacgaaacatggacattcttggagaagggcatcgacagcgtgatgctgaagctggaggaaggtgtggacatgaagacttacatggctctgtatacggcggttcataacttttgtacatcacagaaggctgtcggaactggttcaggattgcaagcccatcgtggagcacacttgctcggtgaggagctatacaagctactcggagagtatctttcgcaccatctcgcagccgtcaacagggagtccgagggtcattcggacgaggccttgctaggattctacatacgcgaatggacccgctacactacggccgccaagtacatcaatcaccttttccggtacctgaaccgccattgggtcaagcgtgagatcgacgagggcaagaaaaatgtctacgacgtgtatactctgcacctggtcaaatggaaggatgatttcttcatgaaggttcatcaaaaggtcatggatgccgttttgaacctggtagagaaacagcgaaacggtgaaaccattgagcagtcacaaatcaagagcatcgtcgactccttcgtctccctcggcttggatgagagtgacagtaccaaatcgaccctcgaagtctaccgtttccatttcgaaaagcccttcatcgccgctactagggtttactatgagaatgaatcccggcgatttgtggctgaaaacagtgtggtggaatacatgaagaaggcggaggcccgcctggacgaagagaaggcccgagttggtctttacttacaccccgatatctcgaagcacctcaccgatacttgcctggatgtgctggtcacggcccactcggagctcctcagagatgagttccaggttcttctggacaacgaacgtcaagatgatctcgctcggatgtatcgactcctttcccgcattaaagatgggctggatcctctgcgggcaaagtttgagattcatgtcagaaaggccggtctggcagcagtggagaaggtggctacggaaggtgaggccttcgagcctaagatgtacgtgaatgcgctattacaagtgcacacccggtatcaaagccttgtcaacgaagcgttcaatggcgagtccgagttcgttcggtcgctggataacgcctgccgcgagtttgtcaaccgcaacaaaatttgctcatccagctccacaaagtcacccgagttgttggcgaagtacaccgattccctgttgaagaagggatcaaaggctgcggaagagtccgagttggaggaaatgctggtgcaaattatgacggtcttcaagtacatcgaagacaaggatgttttccaaaagttctattcgaagatgctcgctaaacggctggtacacgtcagttcggtatccgatgacgcggaaaccagtatgatcagcaagctcaaggaggccagtggtttcgaatacacaaacaagctgcagcgcatgttccaggatattcaaatttcgaaggatctcaacgcgagctacaaggactggcaagaaaaggttctcgacgacgacgatcggaagaaactggttgataccaatttccagattctgggaaccggtttctggcctcttcaagcgccctctactgatttccttgctcctccagagattgtcaagactgctgagcggtttcagaacttctacttcgacaagcataatggtcggaaattgacctggctctggcagctctgcaagggtgaaatcaaagccaattacatcaaaaatacgaaagtgccttataccttccaagtttcgaccttccagatgggtattcttcttcttttcaacgagactgacaccctcgaatactctgatattcaaaaggctacttccctcgctccggaaatccttgaaccaaacttgggcattctcctgaaagcgaaggtgctcaccatcagccctgaaggatctaagccaggacctggtacctcgttctctttgaactacaacttcaagaacaagaagatcaaggtcaacttgaacattcaaatcaagtctgagcagaaggtcgaatcggatgaaacccacaagacgatagaggaggaccgcaagctactgcttcagtcggcgattgttcgcattatgaagtcgcgcaagaagatgaagcatgtgcagcttgtccaagaggtgattcagcaggtcaaatctcggttccctcccaaggtgcctgacatcaaaaagaacatcgaacttcttatggagaaggactatatagagcgattggacggtgatgaaatcgcttacattgcatga

SEQ ID NO: 13618 - protein, 764 aa, Aspergillus terreus NIH2624
MPAPIPQPPHKDNLDETWTFLEKGIDSVMLKLEEGVDMKTYMALYTAVHNFCTSQKAVGTGSGLQAHRGAHLLGEELYKLLGEYLSHHLAAVNRESEGHSDEALLGFYIREWTRYTTAAKYINHLFRYLNRHWVKREIDEGKKNVYDVYTLHLVKWKDDFFMKVHQKVMDAVLNLVEKQRNGETIEQSQIKSIVDSFVSLGLDESDSTKSTLEVYRFHFEKPFIAATRVYYENESRRFVAENSVVEYMKKAEARLDEEKARVGLYLHPDISKHLTDTCLDVLVTAHSELLRDEFQVLLDNERQDDLARMYRLLSRIKDGLDPLRAKFEIHVRKAGLAAVEKVATEGEAFEPKMYVNALLQVHTRYQSLVNEAFNGESEFVRSLDNACREFVNRNKICSSSSTKSPELLAKYTDSLLKKGSKAAEESELEEMLVQIMTVFKYIEDKDVFQKFYSKMLAKRLVHVSSVSDDAETSMISKLKEASGFEYTNKLQRMFQDIQISKDLNASYKDWQEKVLDDDDRKKLVDTNFQILGTGFWPLQAPSTDFLAPPEIVKTAERFQNFYFDKHNGRKLTWLWQLCKGEIKANYIKNTKVPYTFQVSTFQMGILLLFNETDTLEYSDIQKATSLAPEILEPNLGILLKAKVLTISPEGSKPGPGTSFSLNYNFKNKKIKVNLNIQIKSEQKVESDETHKTIEEDRKLLLQSAIVRIMKSRKKMKHVQLVQEVIQQVKSRFPPKVPDIKKNIELLMEKDYIERLDGDEIAYIA

SEQ ID NO: 13619 - DNA, 2385 bp, Aspergillus terreus NIH2624
  CDS (1)..(2385)
atgtataacttctcgaatcgggagtccaagcccggcgcgccgcccgtgtctggtccgtcgtccgccaccaaacctcgcccattcaacgcatcctctcgtcaaaacaacttcaccccccacaccggcgcgaaaaaactcgtcgtgaaaaacctccgcacgggctcccgactaaaccaagattcgtactttgaaaaggtctggggtcaacttgatgcggcattggcggcgattttcgactgtggaaagccggacacatcgttggaagaactctataagggcgccgagaatgtgtgtcgccagggaagggccgcagtgctggtcaagaagctccaagaccgttgtcgagagcatgtctccggaaagcttcacgatacgctggtggccaaggccgggagcgggagtaatattgatacgctacgggcggtggtcgaggcatggtcggcctggcagtcaaagctggtaaccatccgatggattttctactacctcgaccaatctttcctccttcattccaaggaatatcccgtgatccgcgaaatgggattaatccaattccgacagaacatcttcaccgatcctgtgctcgagcccaaaattctacagggggcatgcgaccttatagaagccgaccgtgacgaagagcagagtatgattgccgattcctctctgctgcgaaatgccatcgaacttttccacggcctcgatgtttacagcagcaatttcgaaccgctctttgtatctgaatcaagcaagttctttgcctcttgggcccaaagggaggcgtcaggctacctcgcaaacttcgcggaaaacagtcaccgcctgatccaacgagaagttgaccgatgcgagctattttcgctcaaccgaagcaccaaacagaagctatccgagctgcttgatcaagccttggtggcggatcaggaggcggtcctacttaatgaaaaggacgttcttggactgttgcgagccagcaataaagtcgctctagagaagctctattcactcctccagagacaagacctcggtaggaagttgaagggggctttcagctcgtacatcatagaagaaggctctggtattgtcttcgacgatgagaaagaggcagaaatggttgcccgtttgttggacttcaaacagcagcttgatgaaacgtggaataactcttttcatcggaacgaggaactgggccatacactgcgcgaggctttcgaaacgttcatgaacaagggcaggaagtccgagtccactggaggaactgacaatcccaagactggtgagatgatcgccaagtacgtggacaggttactcaagggtggatggaagttgcctcctgggcgcaatgcggatgacgttccgctagctgacgaagacgccgagatcaatcgccaattggatcaggtcctagatctcttccgttttgtgcatgggaaggcagtctttgaagccttttacaagaacgacttggcccgtcggctgctgatgggccgcagtgccagtgacgatgcggagaagagcatgctttcccgactcaagacagaatgtggatccagcttcacgcacaatctggagtccatgttcaaggacatggatgtggcacgagacgaaatggtggcctacaactctctccagcgcgagcgccgacaccgtttgcccgtagatctgaacgtgagcgtgctctcctccgcgtcatggccaacataccccgacgtccaagtccgaataccgccggagatcgccaccgctgtcgacgacttcgagaagttctactacaacaagtatcagggacggaaactcaactggaagcatcagctggcgcactgccaactgcgggcccgatttcctaaaggagataaggaattggtagttagttcgttccaggctatcgtgctcctgttgttcaatgaggtcccggagggagggtctctgagttatgcccagatccaggaagcaaccagtctatccgacaaagaactgaagcgcacactgcaatccctcgcttgtgccaagtatcgggtactcagcaagaagccgaaagggcgagacgtcaaccccacggacgagttctcgtataacgccgggttctctgatgcgaagatgcggatcaagatcaatcagatccagctgaaggagaccaaggaggagaacaagacgacgcacgagcgggtggcggccgatcggcattacgaaacgcaggcagcgattgtgcggatcatgaagagtcgtaagacgatcacgcacccggaactggtagcggaggtgatcaaggcgacacgcagccggggagtgttggagccggctgatatcaagaagaacatcgagaaattaattgaaaaggactacatggaacgggaggagggcaaccggtaccagtatgtagcgtag

SEQ ID NO: 13620 - protein, 794 aa, Aspergillus terreus NIH2624
MYNFSNRESKPGAPPVSGPSSATKPRPFNASSRQNNFTPHTGAKKLVVKNLRTGSRLNQDSYFEKVWGQLDAALAAIFDCGKPDTSLEELYKGAENVCRQGRAAVLVKKLQDRCREHVSGKLHDTLVAKAGSGSNIDTLRAVVEAWSAWQSKLVTIRWIFYYLDQSFLLHSKEYPVIREMGLIQFRQNIFTDPVLEPKILQGACDLIEADRDEEQSMIADSSLLRNAIELFHGLDVYSSNFEPLFVSESSKFFASWAQREASGYLANFAENSHRLIQREVDRCELFSLNRSTKQKLSELLDQALVADQEAVLLNEKDVLGLLRASNKVALEKLYSLLQRQDLGRKLKGAFSSYIIEEGSGIVFDDEKEAEMVARLLDFKQQLDETWNNSFHRNEELGHTLREAFETFMNKGRKSESTGGTDNPKTGEMIAKYVDRLLKGGWKLPPGRNADDVPLADEDAEINRQLDQVLDLFRFVHGKAVFEAFYKNDLARRLLMGRSASDDAEKSMLSRLKTECGSSFTHNLESMFKDMDVARDEMVAYNSLQRERRHRLPVDLNVSVLSSASWPTYPDVQVRIPPEIATAVDDFEKFYYNKYQGRKLNWKHQLAHCQLRARFPKGDKELVVSSFQAIVLLLFNEVPEGGSLSYAQIQEATSLSDKELKRTLQSLACAKYRVLSKKPKGRDVNPTDEFSYNAGFSDAKMRIKINQIQLKETKEENKTTHERVAADRHYETQAAIVRIMKSRKTITHPELVAEVIKATRSRGVLEPADIKKNIEKLIEKDYMEREEGNRYQYVA

SEQ ID NO: 13621 - DNA, 2175 bp, Chaetomium globosum CBS 148.51
  CDS (1)..(2175)
atgcctgccgcaggcttctcggggatgcccatgcagcccgtcaaggatgacatcgacactacatggacttatttgcaagatggaatcaccatgattatgatgaacctccagcagggtatcgacctgcaaacatacatggggatctacacagccgtccacaacttttgcacatcccaaaaagcggtcggcttcgccctacagagccatgttatcggatcgtctcagcggggcgctcaccttctcggcgaagacctctacaaaaagttgtcggagtatctatccgagcacttgaaaggtctggtcaccgagtcgaaggctcacacggacgaggcgctcctgtcattctacatcagggagtggcaacgctacacggacgcggcgaaatatatccaccacttgttccgctacctcaaccgccactgggtcaagcgtgaaatcgacgagggcaagaagcacgtctacgatgtctacaccctgcaccttgtacagtggcgcgatgtcctcttctccagggtctcggaaaaggtcatggcggccgtcctcaagctcgtcgagaagcagcgcaacggcgagaccatcgaacacaaccaaatcaagcagcgtccgttcctcgatgcgactaaggttttctacgagaacgagagcaagcagttcgtggccgagaacagcgttgtggaatacatgaagaaggccgagggcaacgcccttgacgaggaagaggagcgggtactcattgccgaccactccaccatcctgcgcgacgagttccaggttctcctcgacaacgaccgggaagaagacatggcacgcatgtacagcctcctgtcgcgcatccccgacggtctcgaccctctgaggacaaagttcgagagccacgtacggaacgccggtcttgccgccgtcgccaaggtggcatcagatgccgataagttggagcccaaggtctacgttgacgccctgctggaaatccatacccagtatcaaggactggtgaagcgcgcctttaaggatgagcccgagttcacacggtccctcgacaatgcctgcagggagtttgtgaatcgcaacgaggtctgcaagtccgggtctaataaatcgcccgagctgctggccaagtacaccgacgtgctcctccggaagagcagcacgggtgtggaggacgccgagctggagacaaggctcgtacagatcatgacggtgttcaagtacatcgaggacaaggacgtgttccagaagttctactctcggatgttggcccgtcgcttagtccacagcaattcatcgtcggacgatgccgagaccagtatgatcaacaagctcaaggaggcgtgcgggttcgagtacaccaacaagctgcagcgtatgttcctggatatgcagatctccaaggatctcaactctggcttccgggaacacgtccagactctcgggacgaaggggctcgactcgtcatattcgatcctgggcaccggtttctggccgcttacggcgccggggaccaacttcgaccctcctgaggaggtgtcagcagactgcgagcgcttcagccgttactacaagaacaagcacgagggccgcaagctcacgtggttgtggcagctgtgcaaaggcgaagtcaaggcgaactacgtcaagaacgccaagatgccctacacattccaggtgtcgatataccagatggccatcctactcttgttcaacgagaaggacaagaacacgtacgaggagctcgcgtcggcgacgcagctcaacaacgaggccctcgaccccgcgctcggcatcctcctcaaggccaaggtcctcaaccttgagcccgggagcggcgggggttccaaggtcggccccggctccagctttactcttaactatgagtttaagaataagaagtaccgcgtcaacctcaacgtgggcatgaagtcagagactaagcaggaggaggccgagaccaacaagacgattgaagaagatcgtaagctgttgttgcagtcggccattgtgcgcatcatgaaggcgcgcaagcacatgaagcaccagcagcttgtcagcgaggccatcaaccagatccgtgcccgattcgtgcctaaggttagcgatatcaagaagtgtatcgagatcttgctcgacaaggagtaccttgagcgcctggaggaggatgagatcggctatctggcctaa

SEQ ID NO: 13622 - protein, 724 aa, Chaetomium globosum CBS 148.51
MPAAGFSGMPMQPVKDDIDTTWTYLQDGITMIMMNLQQGIDLQTYMGIYTAVHNFCTSQKAVGFALQSHVIGSSQRGAHLLGEDLYKKLSEYLSEHLKGLVTESKAHTDEALLSFYIREWQRYTDAAKYIHHLFRYLNRHWVKREIDEGKKHVYDVYTLHLVQWRDVLFSRVSEKVMAAVLKLVEKQRNGETIEHNQIKQRPFLDATKVFYENESKQFVAENSVVEYMKKAEGNALDEEEERVLIADHSTILRDEFQVLLDNDREEDMARMYSLLSRIPDGLDPLRTKFESHVRNAGLAAVAKVASDADKLEPKVYVDALLEIHTQYQGLVKRAFKDEPEFTRSLDNACREFVNRNEVCKSGSNKSPELLAKYTDVLLRKSSTGVEDAELETRLVQIMTVFKYIEDKDVFQKFYSRMLARRLVHSNSSSDDAETSMINKLKEACGFEYTNKLQRMFLDMQISKDLNSGFREHVQTLGTKGLDSSYSILGTGFWPLTAPGTNFDPPEEVSADCERFSRYYKNKHEGRKLTWLWQLCKGEVKANYVKNAKMPYTFQVSIYQMAILLLFNEKDKNTYEELASATQLNNEALDPALGILLKAKVLNLEPGSGGGSKVGPGSSFTLNYEFKNKKYRVNLNVGMKSETKQEEAETNKTIEEDRKLLLQSAIVRIMKARKHMKHQQLVSEAINQIRARFVPKVSDIKKCIEILLDKEYLERLEEDEIGYLA

SEQ ID NO: 13623 - DNA, 2481 bp, Neosartorya fischeri NRRL 181
  CDS (1)..(2481)
atggctatgagggctaggcacaagattcgtgccccacggaggggtctgagcgcggcgaagactgacgattttgacacaatatggggggtgctgtcatcttctttgaatgaaatacacacaaagaatgcctccgctctttccttcgaagagctgtaccggaacgcctacagaatcgtattgatgacccgcggtgatgacctctacgaacgagtaaagaagttggaggaagaatggctgggaagcgaggtaaagaaaacagtgactgcagcaatttcgccgacattactgctggcgcaggagcctgcagatatgcaagaccaagccagcgagcgaagggaagcaggagagaagttcttgactgtgctcaagggtgcatgggaagatcatcaactatgcatgggaatggttacagacgttctcatgtacatggatcgaatcatcatggcggactttcgaaagccttcaatatatgttgcctccatggcgttatttcgcgaccaagtcctgcgatctcccattcaacctgacacgaaaaccacagttgccgatgtgcttgagaccactgtgctgttcatgattcaattggaacgatctggtcacgtcattgaccgtcccctcatccggcattgtatctacatgctagagggtctctatgaaactatcacggaggaggagtcatcaaaactctatctgaccatgttcgaacctgctttcctcgaaacaagcaaggttttctatcgagctgaagggcaacgtctgttggaaatggccgatgcagcttccttttgtcggatcgcctcgaaccggattgccgaagagaaagaacgatgccattataccctctcgccccttactgagccaaaaatcaagaatgtcctcgatcaagagttaattgccaggaacatcgaagaggtcatcaatcttgaaggcacgggtgtcaggaatttgcttgacaacgatcgggtggatattttgcgagacatttatgaacttagcgctcgggttgacaacaaaaagacacctctcaccacggcagtccagaaacggatcagtcagatgggtcgagagatcaatgcctcgtccatagcatatgagaagtcgtcaatatctgctggttcgaaagcaacggaaaagagtcccagcggcgagaagaagcccgcagaaaaagaaaagcctgtgaaccagcaaacagtggctgctatcaagtgggttgatgatatcctagctctcaagaggaaattcgacaatatctgggagaaggccttcttgtcagaccagggcatgcaaagtgcaatcactactagcttttcggacttcatcaactcaaatgcacgcagttctgagttcctttctctcttcttcgacgagaatttgaaaaagggcatcaaaggcaagacagaaagtgaggtggattcccttcttgacaacggcatcactctgctgcggtatatcaaggataaggatttattcgagacttattacaagaaacatctttctcgccgtctcctcatgaagcggtccgccagcatggatgctgaacggcagatgatctcgaagatgaagatggaggttggaaaccagttcacacagcgcttggaggccatgttcaaggacatgaccatctcagaagatttatctgccagctacaaagagcatatacggaagtcaggggacccggaccagaaacgggttgacttggaaatcaacgtcctcaccagcaccatgtggccgatggagatcatgtcgaaccccaaagatggagaagtccagctcccatgtatccttccgaaagaggtcgagagcgttaaacagagctttgagcaattctatctcaacaaacacaacggcaggaagctatcatggcaaccgagcatgggaaccgctgacatccgggcgacgtttcaacgatcgagtgggaaggtccaacggcatgaactcaatgtatccacatacgccatgatcatactcctccttttcaacgacgtacctacaggcgagtcactcacgttcgaagagattcaggagcggacgcgcattccgcagcacgacctgattcgaaacttgcaatcactggctgtcgcacctaaaacgcgggttctgaagaaggagcccatgagcaaggatgtgaaaccggcagacaagttctttttcaataacgaattccagagccagtttatgaaagttcgcattggtgtcgtcagtggtggtgccaacaaggtcgagaatcaggaccagcgaaaggaaacagagaacaagatgaatgaggagcgaggggccagtattgaggcggcaatcgttcgcatcatgaagcaacgcaaaacgctggtccactcgagtcttatgagcgaggtgctaggccagttgtctgcgcgattcgttccagatgtgaatatggtcaagaaacggattgagagtttgattgaccgtgaatatctcgagcgtgtggctgaggatcctccgacttacggttacattgcttga

SEQ ID NO: 13624 - protein, 826 aa, Neosartorya fischeri NRRL 181
MAMRARHKIRAPRRGLSAAKTDDFDTIWGVLSSSLNEIHTKNASALSFEELYRNAYRIVLMTRGDDLYERVKKLEEEWLGSEVKKTVTAAISPTLLLAQEPADMQDQASERREAGEKFLTVLKGAWEDHQLCMGMVTDVLMYMDRIIMADFRKPSIYVASMALFRDQVLRSPIQPDTKTTVADVLETTVLFMIQLERSGHVIDRPLIRHCIYMLEGLYETITEEESSKLYLTMFEPAFLETSKVFYRAEGQRLLEMADAASFCRIASNRIAEEKERCHYTLSPLTEPKIKNVLDQELIARNIEEVINLEGTGVRNLLDNDRVDILRDIYELSARVDNKKTPLTTAVQKRISQMGREINASSIAYEKSSISAGSKATEKSPSGEKKPAEKEKPVNQQTVAAIKWVDDILALKRKFDNIWEKAFLSDQGMQSAITTSFSDFINSNARSSEFLSLFFDENLKKGIKGKTESEVDSLLDNGITLLRYIKDKDLFETYYKKHLSRRLLMKRSASMDAERQMISKMKMEVGNQFTQRLEAMFKDMTISEDLSASYKEHIRKSGDPDQKRVDLEINVLTSTMWPMEIMSNPKDGEVQLPCILPKEVESVKQSFEQFYLNKHNGRKLSWQPSMGTADIRATFQRSSGKVQRHELNVSTYAMIILLLFNDVPTGESLTFEEIQERTRIPQHDLIRNLQSLAVAPKTRVLKKEPMSKDVKPADKFFFNNEFQSQFMKVRIGVVSGGANKVENQDQRKETENKMNEERGASIEAAIVRIMKQRKTLVHSSLMSEVLGQLSARFVPDVNMVKKRIESLIDREYLERVAEDPPTYGYIA

SEQ ID NO: 13625 - DNA, 2679 bp, Neosartorya fischeri NRRL 181
  CDS (1)..(2679)
atgcagcagaactcgagaggcgcccccgagcagaggagcggtaagcgcaagtcgatcggcaagaggaagctttctgatcaagaagaggcggcatttcggtctcagaactcgcaacagcaacagcaggcgaccatctccgagctcttatctaggaaccatacccacggcaagggttatccccagcaatcccctccatcgaacaagcgttctcggctatcatcgccatcatcgtactcgcgggccccggtttcgtcacaggagcttcatccgccagacaagatgtacaatttttcgaattcggaacatagagcaggtggagcgtttgcgcagagctccccggccaacacggcagtcaagccccatttctcgaatacatcatcgcgtcagagcaatttcacccctcatactggtgcaaaaaggcttgtagttaagaatctccggacgggttcgcggttgaatcaggattcatactttgataaggtctgggcacagctggatgcagcgctgagcgccgtctttagcggcgggaagcccgaggtttcgctggaggagctctacaagggggcagagaatgtgtgtcgccagggaagagccgtggtgttgacccaacggctgcaggaccgatgccgatcgcacatgtctgggggtctgcgggacgagttgctggcgaaggcagctgacgggagtaatgtggatacattgcgggctgtgattgacgcatggagcacttggaaatctaagttggtcaccattcggtggatcttctactacctcgatcaatctttcctacttcattccaaagagtttccagtcatccgtgaaatgggcttgatccagtttcggaatcacatattctccgaccctgtattacaaccaaagattctacaaggggcttgtgacctagttgacgcagaccgcaatgaggatcatgccatgatggcagattcttctttgctccgaaatgctattgaactcttccatggacttgatgtctacacaacaagctttgagcctctccttctttccgagtcgaagcgattcttcgcatcgtgggctcaacgagagtcctctggatatcttgccacatttgtggagaacggccataatctaatagcgagagaagtcaaacgctgcgagctattctcgttgaacagaagcaccaagcagaaactgtctgaacttcttgatcgtgtcttggtagcagatcaagagtcggtgttacttaacgagaaagacgttcttgggttgcttcgaactggcaacaagactgctctggagaagctctacactcttttagagcgaaggcaacttgggacgaaattgaagccagctttcaagaattatattgtggaaggaggctcgcagattgtctttgacgaggagaaggaggctggaatggtcgttcgtttgctagagttcaaggcacagctggacgatacatgggtcaactcgttccaccgcaatgaggagctgggtcatgcactgcgcgaagcatttgcaacctttatgaacaagagccggaaaccggaatctaccggcgggacagacaatgtcaagactggcgagatgattgccaagtacgtggacaggctgctgaaaggtggatggaagctggcacctgggcgcaatatggcggacgtgccgctggccgacgaggacgctgagattaaccgacaactggatcaagtgctggacctgtttcgattcgtcaacggcaaagcggtgtttgaggcattctacaagaacgacctggctcgtcggttattgatgggccgaagcgcaagtgatgatgcggagaagagcatgctggcaaggctcaagacagaatgtggttctacatttacacacaatctcgagtccatgttcaaggatatggatgtagcgcgagacgaaatggctgcatatgcctcgattcagcgcgaacggaggaaaccgctgccgatcgatctaaatgtcagcgtgctctcagcctctgcatggccatcgtaccctgatgtgcaggtgcggattccaccagtcgttgcagaagcgattgatgactttgagacgttttactacaacaagtacaacgggcggaaacttaactggaagcatcagttggcgcactgccagctgcgggccaacttttcgcgcggacagaaggagctggtggtcagctcgtttcaagcgatcgtactcctgcttttcaacgacgttcctgagggcggaagtctgagctatgctcagattcaggaagggacgaaactttccgaccaggagctccaacgcacactccagtcgctggcatgcgccaagtatcaggtcctcactaagaagccaaagggacgagacgtcaatcctacggatgaattctcgttcaatgcgggctttacggacccaaagttccggatcaagatcaatcagattcaactgaaggagacgaaggaggagaacaagaagacgcacgagcgggtggcggccgaccgacatcttgagactcaagcggccatcgtgcgaatcatgaagagtcgcaagcagatctcgcacgctgaactggttgcagaggtgatcaaggcgacgcgaagccgaggagtgttggatgtagcggagatcaagaacaatattgaaaaactgatcgagaaggattacatggagcgagacacggagaccagtcccaatatgtacaaatatgtcgcataa

SEQ ID NO: 13626 - protein, 892 aa, Neosartorya fischeri NRRL 181
MQQNSRGAPEQRSGKRKSIGKRKLSDQEEAAFRSQNSQQQQQATISELLSRNHTHGKGYPQQSPPSNKRSRLSSPSSYSRAPVSSQELHPPDKMYNFSNSEHRAGGAFAQSSPANTAVKPHFSNTSSRQSNFTPHTGAKRLVVKNLRTGSRLNQDSYFDKVWAQLDAALSAVFSGGKPEVSLEELYKGAENVCRQGRAVVLTQRLQDRCRSHMSGGLRDELLAKAADGSNVDTLRAVIDAWSTWKSKLVTIRWIFYYLDQSFLLHSKEFPVIREMGLIQFRNHIFSDPVLQPKILQGACDLVDADRNEDHAMMADSSLLRNAIELFHGLDVYTTSFEPLLLSESKRFFASWAQRESSGYLATFVENGHNLIAREVKRCELFSLNRSTKQKLSELLDRVLVADQESVLLNEKDVLGLLRTGNKTALEKLYTLLERRQLGTKLKPAFKNYIVEGGSQIVFDEEKEAGMVVRLLEFKAQLDDTWVNSFHRNEELGHALREAFATFMNKSRKPESTGGTDNVKTGEMIAKYVDRLLKGGWKLAPGRNMADVPLADEDAEINRQLDQVLDLFRFVNGKAVFEAFYKNDLARRLLMGRSASDDAEKSMLARLKTECGSTFTHNLESMFKDMDVARDEMAAYASIQRERRKPLPIDLNVSVLSASAWPSYPDVQVRIPPVVAEAIDDFETFYYNKYNGRKLNWKHQLAHCQLRANFSRGQKELVVSSFQAIVLLLFNDVPEGGSLSYAQIQEGTKLSDQELQRTLQSLACAKYQVLTKKPKGRDVNPTDEFSFNAGFTDPKFRIKINQIQLKETKEENKKTHERVAADRHLETQAAIVRIMKSRKQISHAELVAEVIKATRSRGVLDVAEIKNNIEKLIEKDYMERDTETSPNMYKYVA

SEQ ID NO: 13627 - DNA, 2271 bp, Neosartorya fischeri NRRL 181
  CDS (1)..(2271)
atgcctcctctaatgccccagactcctcacaaggatgaccttgacgaaacatggacattcctagagaagggtattgacagcgttatgctgaagctggaggagggtgtggatatgaaaacttcagcaacgggcaaggattacaggcgcatcgtggtggttcgtctttccgtcccctatgcgaatgcacacttgttgggcgaggaattatacaagctactaggggagtacttgtcacgccaccttgaagccgtgtacagagagtcccaaagccataccgaagaagccttgttagggttttacattcgtgaatggattcgttacacaactgccgccaaatatgtcaaccacctcttccgctacctgaaccgtcactgggtgaagagggagatcgacgagggcaagaagaatgtctacgatgtgtacactttgcaccttgtcaaatggaaagacgatttcttcatgaaggtccatgagaaggtcatggaggccgtgttgaatctgatcgaaaagcaacgaaacggcgagaccatcgagcagtcgcaaatcaagaacatcgtagattcttttgtgtctctcggtctggacgagaatgatagcaccaagtctacgctggaggtttacagagtatacttcgagaaacccttcattgccgcgaccagagtctactacgagaatgaatcccgccagttcgtggccgagaacagcgtggtagagtacatgaagaaggcggaggctcgccttgacgaggagaaggcccgcgtgggcctgtatctgcatccggatatcatgaagcgtctcacggacacttgccttgatgtcttagtcacagcacattccgaattattgcgggatgaattccaagttctgctagacaatgagcgccaagatgacctagcgcgcatgtatcgacttttgtcgcgaatcaaggatgggctggaccctctgcgggcgaagtttgagactcatgtcagaaaggcgggcttggctgcagtcgagaaagttgcagcggaaggcgaagcgttcgaaccaaagatgtatgtggatgcgctcttacaagtgcacaccaggtatcaaaaccttgtcaatgaggctttcaacggtgaatccgagtttgtgagatccttggataacgcctgccgcgagtttgtcaaccgcaacaaggtttgcaaatccagttcgacaaaatcaccggagctgctggcccgatacaccgattctctcttaaagaagggctcaaaggctgcggaggagtctgagttggaggagatgctcgtacagatcatgaccgtgttcaaatacatcgaagacaaggacgtcttccagaaattttactccaagatgctggctaagcggctggtacacgtcagctcggtatccgacgatgcagagactagcatgatcagcaaactgaaggaagcctgcggtttcgaatacaccaacaagttgcagcggatgttccaggacattcagatttcgaaagatctcaattccaactacaaggattggcaggagaaggtcctcgacgaagacgatcggaagaagcaggtcgacgcacactttcaaattcttggaactgggttctggcccctcaatccacctacaaccggcttttctgcaccacccgaaatcgtcaagacttacgagcgcttccagagtttctactatgacaaacacaatggtcgaaagctgacttggctctggcagctgtgtaagggcgaagtcaaagcaaattacattaagaacacgaaagttccgtacactttccaagtgtcgacattccaaatgggtatcctcctcttgttcaacgagaatgacaccttaacctactccgacatccagaaggctaccagcctcgcccccgaaattctcgaccccaatctggctatcctgctgaaagcgaaggtgctccttccaagccctgaaggggccaaacccgaacctggaacttcattctccctgaattacaactttaagaacaagaagatcaaagtcaatctaaacattcagatcaaatcagagcagaaggtagagtcagacgacacccacaagacaatagaggaggaccgaaaattactcctccagtccgccatcgttcgcatcatgaagtcccgcaagaagatgaagcacgtacagctcgtgcaagaggtcattcagcaggtcaagtcccgttttcctcccaaggtgcaggatatcaaaaagaatatcgaagctctcatggagaaggactatatagagcggttggacggggatgagatcgcttacatcgcgtga

SEQ ID NO: 13628 - protein, 756 aa, Neosartorya fischeri NRRL 181
MPPLMPQTPHKDDLDETWTFLEKGIDSVMLKLEEGVDMKTSATGKDYRRIVVVRLSVPYANAHLLGEELYKLLGEYLSRHLEAVYRESQSHTEEALLGFYIREWIRYTTAAKYVNHLFRYLNRHWVKREIDEGKKNVYDVYTLHLVKWKDDFFMKVHEKVMEAVLNLIEKQRNGETIEQSQIKNIVDSFVSLGLDENDSTKSTLEVYRVYFEKPFIAATRVYYENESRQFVAENSVVEYMKKAEARLDEEKARVGLYLHPDIMKRLTDTCLDVLVTAHSELLRDEFQVLLDNERQDDLARMYRLLSRIKDGLDPLRAKFETHVRKAGLAAVEKVAAEGEAFEPKMYVDALLQVHTRYQNLVNEAFNGESEFVRSLDNACREFVNRNKVCKSSSTKSPELLARYTDSLLKKGSKAAEESELEEMLVQIMTVFKYIEDKDVFQKFYSKMLAKRLVHVSSVSDDAETSMISKLKEACGFEYTNKLQRMFQDIQISKDLNSNYKDWQEKVLDEDDRKKQVDAHFQILGTGFWPLNPPTTGFSAPPEIVKTYERFQSFYYDKHNGRKLTWLWQLCKGEVKANYIKNTKVPYTFQVSTFQMGILLLFNENDTLTYSDIQKATSLAPEILDPNLAILLKAKVLLPSPEGAKPEPGTSFSLNYNFKNKKIKVNLNIQIKSEQKVESDDTHKTIEEDRKLLLQSAIVRIMKSRKKMKHVQLVQEVIQQVKSRFPPKVQDIKKNIEALMEKDYIERLDGDEIAYIA

SEQ ID NO: 13629 - DNA, 2295 bp, Aspergillus clavatus NRRL 1
  CDS (1)..(2295)
atggcgcctcttatgcctcaaacacccctcaaggatgatgtgaacgacacatggggcttcctcgagaagggtatcgacagcgttatgctgaagctggaggagggtgtggatatgaaaacttacatggccctgtataccgcggtccacaacttctgcacatcccaaaaggcagtcagtaatggtcaggggttatcgtcgcaccgcggagcgcatctactgggagaggaactatacaaattattgggcgagtacctatcacgacatctcgaggccgtctacaccgagtccgaaagccacagcgaagaagctttgctgggcttctacattcgcgaatggcttcgatacacaactgccgccaaatatgtcaaccatctgttccgctacctgaaccgtcactgggttaagagggagattgacgagggcaaaaagaacgtatacgatgtgtacaccttgcatctcgtcaaatggaaggacgacttcttcatgaaggttcatgagaaggtcatggacgcagtactcaatctgatcgagaaacaaagaaacggcgaaaccattgagcagtcgcagatcaagaatattgtggattcattcgtctcccttggcttggatgagaacgatagcaccaagtccacgctcgaggtctatcggatctacttcgaaaaacctttcatcgcggcgaccaaagtctattacgagaacgagtcacggcagtttgtggcggagaatagcgtggttgagtatatgaagaaggcagaggctcgtctcgatgaggagaaggctcgggtgggcctgtatttgcaccctgatatcaccaagcacctcaccgagacctgtctggatgtgctcgtcaagacacactcggaacttcttcgggacgaattccaagttctgctcgacaatgagcgtcaagatgacctggcacggatgtaccgactgttgtcacggatccaagacggtctggatcccttgcgggcgaaattcgagacccatgtccgaaaagcgggtttggctgctgtcgaaaaggtcgctgcggaaggcgaagcgttcgagcccaagatgtacgtggatgccctcttgcaagtgcacactaggtatcagaatctcgtcaacgaggccttcaacggcgagtctgagtttgtgaggtccttggataacgcttgtcgcgaatttgtcaatcgcaacaaggtgtgcaagtccagctcgaccaagtcgcctgagctgctggctcgatataccgattctctcttgaagaaaggctcgaaggctgcggaggagtcggagctggaagagatgttggtacagattatgaccgtcttcaaatatatcgaagacaaggacgtattccaaaaattctattccaagatgctggccaagcgtctagtacatgtcagctcggtttctgatgatgcggagaccagcatgatcagcaaactgaaagaagcctgtggtttcgagtacaccaacaaactgcaacgcatgttccaggatatccagatctcgaaagatcttaatgccagctacaaggattggcaggagaaggtcctagatgatgatgaccggaagaagcaagtggatgcacacttccagatcctggggacaggtttctggccactcaacccgcctacgaccggcttttcagcaccgcctgaaattgtcaagacctacgagcgattccagagcttctactatgacaaacacaacggtcggaagctgacctggctctggcagctctgcaagggcgaggtcaaggcaaactacatcaaaaacaccaaggttccatacacattccaggtgtcaacgtttcaaatgggcatcctcgtgctcttcaatgaacaggacaccctatcctactccgacatccaaaacgccaccagtcttgctcccgaaatcctcgaccctaatctggccatccttttgaaagccaaggtgctcctgccaagcccagaaggggccaaaccgggacctggagcctcattctctctgaattacaacttcaagaacaagaagatcaaggtcaacctgaacatccagatcaagtcggagcagaaggttgagacagatgacacccacaagacgatagaagaagacagaaagttgctccttcagtctgccatcgtgcgtatcatgaagtcccgcaagaagatgaaacacgtccagctcgtgcaagaggtcatccagcaggtcaaatcacgcttccctccaaaggtgcaggatatcaagaagaacatcgaggcgcttatggagaaggactacatagagcgattggacggagacgagatcgcttacattgcgtga

SEQ ID NO: 13630 - protein, 764 aa, Aspergillus clavatus NRRL 1
MAPLMPQTPLKDDVNDTWGFLEKGIDSVMLKLEEGVDMKTYMALYTAVHNFCTSQKAVSNGQGLSSHRGAHLLGEELYKLLGEYLSRHLEAVYTESESHSEEALLGFYIREWLRYTTAAKYVNHLFRYLNRHWVKREIDEGKKNVYDVYTLHLVKWKDDFFMKVHEKVMDAVLNLIEKQRNGETIEQSQIKNIVDSFVSLGLDENDSTKSTLEVYRIYFEKPFIAATKVYYENESRQFVAENSVVEYMKKAEARLDEEKARVGLYLHPDITKHLTETCLDVLVKTHSELLRDEFQVLLDNERQDDLARMYRLLSRIQDGLDPLRAKFETHVRKAGLAAVEKVAAEGEAFEPKMYVDALLQVHTRYQNLVNEAFNGESEFVRSLDNACREFVNRNKVCKSSSTKSPELLARYTDSLLKKGSKAAEESELEEMLVQIMTVFKYIEDKDVFQKFYSKMLAKRLVHVSSVSDDAETSMISKLKEACGFEYTNKLQRMFQDIQISKDLNASYKDWQEKVLDDDDRKKQVDAHFQILGTGFWPLNPPTTGFSAPPEIVKTYERFQSFYYDKHNGRKLTWLWQLCKGEVKANYIKNTKVPYTFQVSTFQMGILVLFNEQDTLSYSDIQNATSLAPEILDPNLAILLKAKVLLPSPEGAKPGPGASFSLNYNFKNKKIKVNLNIQIKSEQKVETDDTHKTIEEDRKLLLQSAIVRIMKSRKKMKHVQLVQEVIQQVKSRFPPKVQDIKKNIEALMEKDYIERLDGDEIAYIA

SEQ ID NO: 13631 - DNA, 2331 bp, Pichia stipitis CBS 6054
  CDS (1)..(2331): transl_table=12
atgccatttcctgtagccagcgacttgaacgctacatggagtttcatccaaccaggcttggagttcatcttgggtgcccaaggcgatcaaggtgttacgcccaagatgtacatgaactgttacactgctgtttacaactactgcgttaacaaatcacgtcatggggccactgctacgtctattgctgcttcctcggactccaactcttattcattggctggagccgagatctacgctaaattggacgtatacttgactcaattcatccgagccttgaagaaagagccctcggaaacatttctcgagttctatgtccgcaaatggacccgtttcactatcggcgccggctacatgaataacgtatttgactatatgaaccggtactgggtgcagaaggagcgttccgatggaagacgggatgtttttgacgttaacacactttcactcatcaaatggagatcggagatgttcaacaacaactctgacacgttgatttccgaagtgttagatttgattgaaatgcagagaaacaacgaaatcgtagacacctctcttatctcaactgccattaagtcgctagtattcttaggaattgatgttcaggacttgaagaaaccgaacttggttgtctacatcagttatttcgaaaagaacttcttggaaaagacaggcgaatactacagcagagaaagctcacagtatctccaagagcacaacgtcgtggactatatgaagaaatgtgaagccagattggctgaagaaatctctagatcaaataactacttggaagaccacaccaagaagcacttgttggacatcttgaacaaagtcttgatagaggaccatgccaacgagatgtacagccaatttctcactttattagaacaaaacgagacggaccacatccagagaatgtacaagttgttgtacagacttcctgcaactttaggaccattggctgatactttggagcagtacatcaaagaacaagctgacaaggctattgaaaaagtaaaactagcctcagagtcacaggctgaagccaaagttgatggtaagcctacaaagaagtcggctgctggagcagttgatcccaagtcatatatcaacactcttatagccatctataaccagtacaacgaagtagtgcaccaggcattcaacaaggatacacgtttcattaagtccttggacaatgcctgccgtcatttcatgaacaaaaactcaatagctattcccacacctaaagctaagtgcaagactccagagcttttggctagatatgctgacagcttcttgagaggaaccagtaaagaagtggacactgtggacatgaatcccgagaacttgatgattgttttcaagtacttaaatgacaaagatgcttttgaagaatactaccgtcgtctgttggctaagagattaatcaacggtaacagcaagtcagaggagttggaagaaagtattatccagagattgcaggaagaaaactcaattgagtacacttccaagatgaccaagatgttctcggacatgaaggcttctgaagatttgaaggctaacatcaaggaccatgtttctgagtctatagtcaaggatttcaaccccttgatccttgcccagagtatgtggccatttacacacatggaagattacgaccttaatgtagcacctgaattgcaggcaccatttgaaaaagtggtagagatctatggagccaagcacaacggtagacagctcaagtggctttggaatcatggtagagccgaattgagagccaatctttccaaaaaaggtaaggctccatttgtattcacagtcagtaatttacaaatgatgattttgatagctttcaacaagaaaagtacatacactttcctggagttgcacgaaatcgtgggagctgcaagacacacgttcgaatctcatttgcttccattcacgaagtacaagttgcttgaccagagtccaccgggaccagagaacactggcaatgcagacaccaccttcaccatcgtggaagagtacaagtccaagaaactcaaggtcaactttaccagtgtgatcaaaaacaacgaagctaaacaggaagaagatgacgccaacaaagagattgacgaaacacgtagaaactacctttcagcctgtattgtgagaatcatgaagtcgcgaaagacggtcaagcacaacgaattgataaacgaggtgttaccgcagacgttgtcgcggttccatgctaagattatcgatattaagagagtcatagaccagttgatagagaagcagtatatccagcgtattgacaacaatacctacgaatacttgtcatag

SEQ ID NO: 13632 - protein, 776 aa, Pichia stipitis CBS 6054
MPFPVASDLNATWSFIQPGLEFILGAQGDQGVTPKMYMNCYTAVYNYCVNKSRHGATATSIAASSDSNSYSLAGAEIYAKLDVYLTQFIRALKKEPSETFLEFYVRKWTRFTIGAGYMNNVFDYMNRYWVQKERSDGRRDVFDVNTLSLIKWRSEMFNNNSDTLISEVLDLIEMQRNNEIVDTSLISTAIKSLVFLGIDVQDLKKPNLVVYISYFEKNFLEKTGEYYSRESSQYLQEHNVVDYMKKCEARLAEEISRSNNYLEDHTKKHLLDILNKVLIEDHANEMYSQFLTLLEQNETDHIQRMYKLLYRLPATLGPLADTLEQYIKEQADKAIEKVKLASESQAEAKVDGKPTKKSAAGAVDPKSYINTLIAIYNQYNEVVHQAFNKDTRFIKSLDNACRHFMNKNSIAIPTPKAKCKTPELLARYADSFLRGTSKEVDTVDMNPENLMIVFKYLNDKDAFEEYYRRSLAKRLINGNSKSEELEESIIQRLQEENSIEYTSKMTKMFSDMKASEDLKANIKDHVSESIVKDFNPLILAQSMWPFTHMEDYDLNVAPELQAPFEKVVEIYGAKHNGRQLKWLWNHGRAELRANLSKKGKAPFVFTVSNLQMMILIAFNKKSTYTFSELHEIVGAARHTFESHLLPFTKYKLLDQSPPGPENTGNADTTFTIVEEYKSKKLKVNFTSVIKNNEAKQEEDDANKEIDETRRNYLSACIVRIMKSRKTVKHNELINEVLPQTLSRFHAKIIDIKRVIDQLIEKQYIQRIDNNTYEYLS

SEQ ID NO: 13633 - DNA, 2109 bp, Ostreococcus lucimarinus CCE9901
  CDS (1)..(2109)
atgctgcgcgacgcgatcgcggcggtgcaagagaaacgacagacgagggagagccacgagacgctgtacagggcggtggagaatttgtgcgtgcacaagcgcggcgacgacgcgtttgaggattttcgcgcgggtggggacgcgcggagcgaaaaggtgctcgtagagctggaaaagaagaagataggtgactccatggtgtttctgaggacgtttgatgaggtttggggagagtactgcgcgcaggcgttgacgctgcggtcaatttttttgtatttggaccgcgcgcgcgcgaacgggggtgggaaggcgagcacgctttgggacgtttcgttgcggttgtttcacgaacatttagagaattcggcgaagagcgtgaaggggaaagtcgtccgcggattgctcgatctcatcgagcgcgagaggatgggtgagaagattgatagagcgctcgccaagcgcgtgttgcgcgcgctgagcgcgttgggcgtgtacggcgaggcgtttgacaccgtcttcatagaggcgagccaggaattttaccgtaaagaagggaacgagtacggggcacagacggatgtttctgactatttgaagcactgcgagcgacgattggaggaggaggcggagcgctgcacgaattacttggacgccagcacggcgcgagggttgatgcgcgtgtgtgagcaaggtttaatagaggcacacatcggggatatcctcgataaggggttcgtcgatctcatgcgtcagcatcgaatagacgacttgaagcgattgcactcactcttggcgcgcatggacggattagatcgcctgagtgcggctttcgtgacgtacctcaagcagcaaggcaccgccatcgtcaaggacgacgcgaacgataaagaaatggtcgaacgcttgctggcgatgaaaagcgccgtcgacgaagtgttgaataaatcgttcggccgctccgccgcggatggatcgaacgatattttcatcaacggcgtcaaggagtcgtttgagtcgttcataaactgtcgtcaaaacgtccccgcagagctcatagccaagtacatcgattccaagctcaagagcggcaacaaaggcgcgagcgaggaggaattggagacaacattagacaaagcgttgacgctgtttaggtacatcgtcggtaaagatgtgtttgaaggcttttacaagaaggagctcgccaagcgtttgttacacgcgaagagtgcgagcatcgacgcagagaagagcatgattagcaagttgaaggcggagtgcgggagccagttcacgcagcatctcgagggtatgttcaaggatatcgatcttagtcgcgagatcatgcaatcgttccgacagacgtttgacgacgaggcgttgacaaagggtatagagatgaacgtaaacgtcatcacgcaaggatgctggccatcgtatccagttatcgacgtcaatattcccgagcaactcgctgttttacaggaaaagtttcaagacttttacctcggaaagcactctgggcgacagttgacgtggcaaaactcacaaggccactgcgtgctgaaggcgcgattcggtagcggcatgaaggagctcagcgtgtcgctctttcaatgcgtcgtactcatgttgttcaatgacgccgaaaaactttcctacgaggacatagcgtcgaagagtgggctagaggagaaagaattaaagcgtgcgctgcagtcccttgcatgtgccaaggtccgtatcttgaacaaagagccgaaatctcgcgacgtcaacgcgggcgacgtcttcgaggtcaacgccgcgctcaacgagcgcctgttccgcatcaaggtcaattcgattcaaatcaaagaaaccacggaggaaaataagcaaaccatggagcgcgtgttccaagaccgtcaacagcaagttgacgccgcgatcgttcgcgtgatgaagacccgaaagtcgctcacccacgccttgctcatctccgagctcatggcgcagctgaaatttccgacaaaggcgagcgatttaaagaagcgcatcgagagtctcatcgagcgcgagtacatcgagcgcgaccgcgaggacgctcaaaagtacaactacctcgcgtaa

SEQ ID NO: 13634 - protein, 702 aa, Ostreococcus lucimarinus CCE9901
MLRDAIAAVQEKRQTRESHETLYRAVENLCVHKRGDDAFEDFRAGGDARSEKVLVELEKKKIGDSMVFLRTFDEVWGEYCAQALTLRSIFLYLDRARANGGGKASTLWDVSLRLFHEHLENSAKSVKGKVVRGLLDLIERERMGEKIDRALAKRVLRALSALGVYGEAFDTVFIEASQEFYRKEGNEYGAQTDVSDYLKHCERRLEEEAERCTNYLDASTARGLMRVCEQGLIEAHIGDILDKGFVDLMRQHRIDDLKRLHSLLARMDGLDRLSAAFVTYLKQQGTAIVKDDANDKEMVERLLAMKSAVDEVLNKSFGRSAADGSNDIFINGVKESFESFINCRQNVPAELIAKYIDSKLKSGNKGASEEELETTLDKALTLFRYIVGKDVFEGFYKKELAKRLLHAKSASIDAEKSMISKLKAECGSQFTQHLEGMFKDIDLSREIMQSFRQTFDDEALTKGIEMNVNVITQGCWPSYPVIDVNIPEQLAVLQEKFQDFYLGKHSGRQLTWQNSQGHCVLKARFGSGMKELSVSLFQCVVLMLFNDAEKLSYEDIASKSGLEEKELKRALQSLACAKVRILNKEPKSRDVNAGDVFEVNAALNERLFRIKVNSIQIKETTEENKQTMERVFQDRQQQVDAAIVRVMKTRKSLTHALLISELMAQLKFPTKASDLKKRIESLIEREYIERDREDAQKYNYLA

SEQ ID NO: 13635 - DNA, 2238 bp, Ostreococcus lucimarinus CCE9901
  CDS (1)..(2238)
atgagcgatcgacgcgtgatcgcgcttgaagatggttgggggaacatggaggatggtatcatgaaacttagacgcattctagatcaggaggatgcggaatcgttcacgtcggaagagtacatgaatctttacacgacgatttacaacatgtgcacgcagaaggcgccgtacgatttttccgaagagttgtacaagcgctacgaggccgcgtttaaccaatacatcaactcaaaggttttaccggcgctcgtggaaaaaaagggagagtacatgctgagaagcttgatgagtcgatgggaaaatcacaagataatggttcgctggctgtctcggttcttcaactatctcgacagatactacgtccagcgccatcactacgcgacactcaatcaagtcggcgtgggttgcttccgaagactggtgtacgaagaaatcaagccgagcatgaagacggcggtgttggccctcatagacaaagagcgagaaggagaaaaaagtgatagaggtctcatcaagagcatcacgtcaatcttcgtcgagatggggttgggtacgatggacgcataccaaaacgatttcgaaaacgacttgctcacgcacacatcatcattttacactcgcaaggcgacgcagtggatcgctgaagactcgtgtccggcgtatctcatcaaagcggaagagtgtttgcatagcgaacgcgaacgtgtgcaacaatacttgcatcagagcaccgagtcgaagttgatatcaaaggttgagcagcagctcctcgagcagtacgaaactgagctgctggaaaaggagaatagcggttgcgcagcgctcttggttgacgacaagaaggaggacctagcccgcatgttccgtctctttagctcggtaccgaaaggattggcgccgatagctcagattttcaaaacgcacgttcaaaaagaagggatgagcctggtgaattccgccgaacaggcggcggcggcgatgaaagggaacaaggaaaagccgacgacgtctacgtcgattgaacaggtctttactcgaagtgcgatcgacctgtacgacaaatatagtggttatgtgaacgattgctttggttccaacgcactcttcaaccgcgcgctcaaggaggcttttgaatacttctgcaacaagggcatcggtgaaatctcgacggcgcagctactcgcagattttgcggataagctgttgcgaaagggtgggagcgaaaagttgagcgatgagaagatggaagagacgctggataaagttgtgaagctcttggcatacatcagcgataaggatatgtttggggagtttgctagcaaaaggctttctcgacgcctgttgcaagacacgtctgcgagtcaggattatgagcgctccatcttgagtaaactcaagacgtcgtgcggcgcgcagtttacatcgaagatggagggtatggtgaatgatgtgcagtctgcgcgagacactcaagatgtgtttgagagatgggtagacgaagacgctgctaatcgcaagacttgcatcgatttcaacgtcaccatcttgacgcacggtttctggccttcatggaagcccatccaggtggagctgtgtgacgagttcgcgcagtgtgtggaaacgtttcaaactttctatgatgctaagatgagccaaagaaagctcacgtgggtgcatcaactcggagcagtcgtgctaaacgtcaagtacgaagccaagactatagaaatgcacatgcaaacgccccaatgctctgttttgttgctctttcggaatgaaaaagagctgtcgatgcaaaaggtcatagaaaagacaaaaatgccagctgatgccgtgaagcgagcgctctattcgctctcgtgtgccaagtataagattctgaacaagtcccccgagggcaagacggtgaatcccgaagacgtcttttcgtttaacgaaaaattcaccgatcgttcgcgacgcatcaagattgcattgccacctcccgatgagagaaaagctacgattgagaacgtcgtacaagatcgccgtcatgccatcgatgcagccatcgtgcgagtgatgaagactcgcaaggcgttggcatacaacgagctcgtcgtcgaagtcgtgaaccaactccaacagagcttcctcccggaagcaaagatgatcaaaatgcgagtcgatgacctcatcaacaaggaatacatcatgcgcgacgaagaaaactcgcaagttttcaagtacatcgcctag

SEQ ID NO: 13636 - protein, 745 aa, Ostreococcus lucimarinus CCE9901
MSDRRVIALEDGWGNMEDGIMKLRRILDQEDAESFTSEEYMNLYTTIYNMCTQKAPYDFSEELYKRYEAAFNQYINSKVLPALVEKKGEYMLRSLMSRWENHKIMVRWLSRFFNYLDRYYVQRHHYATLNQVGVGCFRRLVYEEIKPSMKTAVLALIDKEREGEKSDRGLIKSITSIFVEMGLGTMDAYQNDFENDLLTHTSSFYTRKATQWIAEDSCPAYLIKAEECLHSERERVQQYLHQSTESKLISKVEQQLLEQYETELLEKENSGCAALLVDDKKEDLARMFRLFSSVPKGLAPIAQIFKTHVQKEGMSLVNSAEQAAAAMKGNKEKPTTSTSIEQVFTRSAIDLYDKYSGYVNDCFGSNALFNRALKEAFEYFCNKGIGEISTAQLLADFADKLLRKGGSEKLSDEKMEETLDKVVKLLAYISDKDMFGEFASKRLSRRLLQDTSASQDYERSILSKLKTSCGAQFTSKMEGMVNDVQSARDTQDVFERWVDEDAANRKTCIDFNVTILTHGFWPSWKPIQVELCDEFAQCVETFQTFYDAKMSQRKLTWVHQLGAVVLNVKYEAKTIEMHMQTPQCSVLLLFRNEKELSMQKVIEKTKMPADAVKRALYSLSCAKYKILNKSPEGKTVNPEDVFSFNEKFTDRSRRIKIALPPPDERKATIENVVQDRRHAIDAAIVRVMKTRKALAYNELVVEVVNQLQQSFLPEAKMIKMRVDDLINKEYIMRDEENSQVFKYIA

SEQ ID NO: 13637 - DNA, 2553 bp, Botryotinia fuckeliana B05.10
  CDS (1)..(2553)
atgcctcccactccaggacagtctttggatgcggccatggcacatgctatcaatacaagtcagatggcttttggacgtgccggtgaaaagaacgaattcgaaatccaatgggagattttacaaaatgcacttcaggaaatccatgaaaagaatgcaggaacactttcgttcgaacaactatatcgggcatcttataaaatcgtactgcgaaaagatggagatttactatatgaacgagtcaaagttttcgaggagcaatggttcgctgggaaagtcatgccaacgattaggaaattgattacttcaaatctggtcaatgttgctgctggtggcgtctctggaacggccgcaaacgaacgacgacttaccggcgaacaatttctagagggactaaaggcttcatggacggatcacaatttatgcatgggtatgacaactgatgttctcatgtatatggatcgagtttattgtggcgataatcgcaaggcttcaatttacactacggccatgggacttttccgggatcacattttacgttcgccacttctggacaattcaagcatgatcactttcgatattttaaattcggttatattagatcagattggaatggagagagaaggtgatgtcatcaatcgacatttgatccggtcggtcatttatatgctagagggtctatacgaaaccgacgcagagaacgagagtgataagctataccttacggttttcgaacctgcattcctgcaagctagcagaaagttttaccaagcagaatgtcaaactttactaagggattcacctgctggtacctggttacgtcaagcgaagagacggctcgaagaggaagctgataggtgtgatacgactatcgcgcatttcacaagcaggaagatccaaaaagttgtcgagcaagaattgatcagcagtcatctgaatgaatttcttgcgatggaaggaagtggtttgcaggctatgatcgaaaacgaccgatttgaagatttatctattctatatcaacttatcactaggatagatgcaggtagaggaccactgaaaattgcactgcaaggtcgtgtggtacaactcggtttggaaatcaacaaaatcattgccagcggtgaatttgaaactcctgtcgtagctgaggataccaagcccgaggcagaagaggatgaagctgaaggtgcgaagaagaaggctaagccaatgaatgctgccgcgaagcaaacactcgcagctatcaagtgggtggacgaggtccttcaattgaaggataaattcgacaatatgtggaaaaaatgcttcaatgaagataccattctggaaactgccatcactaagagcttttcggatttcattaaccttttcgatcgatgttccgagtacgtctccttatttattgacgataacctcaagcgtggcatcaagggcaaaaccgaggttgagatcgacgaagtgctagacaaggccaccactttacttcgatatattcaagacaaagatatgtttgagagatattacaaaaagcatcttgcgaaacgtttactgctcaataaatccgaaagtactgatgtggagaagcaaatgatttcgcgaatgaagttggaaatcgggaattcatttacgactaagctggaaggcatgttcaaggatgtcaccatgtccgaagaacttacccagaactacagaaaccacatcaacaacctcggagacaaggatcataaacaaatcgagctgtctgctatcgttctttctaccaattgttggcctacagaaattattggtggtattccttcatcagacgagggaccccgacaatattgcaattggcctccagaaatgcaaaaattacaagattcattcaaggcattctatctcaaagatcgaaatggtagaatgttgacctggttaggtaatctaggaaatgctgatattcgatgttatttcccagccatcccaggagaaacaggtccgaagagtagggaaagaaagtacgaattaaatgtgaatacttatggcatgatcattttgatgcttttcaacgatctaccagatggtgcaactttatcgtatgaagaaattcaggaacgcttaaatattagcgataaagaattaccacgtgctttgatgcaactctctggtccaccaaaatctcgagttcttctcaagaaacccggaaaacccaatgaattacctacaattggtgatgttttcacattcaattccagttttgttagtaaatctcataagattaaggttcaagcaatgggtggacaaaccagcaaggtcgaaggcgctgaggaaagaagattgactgaggaaagaaatgatgaacatcgaggaaatgttatggacacagtcattgttcgaatcatgaaagcacgtaaagaatttcctcatcaacaactcgttacagaagtcatttcacaacttgcacaacgcttccagcctaatatcaatatgatgaaacgacgtattgaaagtttgatcgaaagagaatatttggaaagaatcgaagatgctaaagtacccacttataagtatttggcttaa

SEQ ID NO: 13638 - protein, 850 aa, Botryotinia fuckeliana B05.10
MPPTPGQSLDAAMAHAINTSQMAFGRAGEKNEFEIQWEILQNALQEIHEKNAGTLSFEQLYRASYKIVLRKDGDLLYERVKVFEEQWFAGKVMPTIRKLITSNLVNVAAGGVSGTAANERRLTGEQFLEGLKASWTDHNLCMGMTTDVLMYMDRVYCGDNRKASIYTTAMGLFRDHILRSPLLDNSSMITFDILNSVILDQIGMEREGDVINRHLIRSVIYMLEGLYETDAENESDKLYLTVFEPAFLQASRKFYQAECQTLLRDSPAGTWLRQAKRRLEEEADRCDTTIAHFTSRKIQKVVEQELISSHLNEFLAMEGSGLQAMIENDRFEDLSILYQLITRIDAGRGPLKIALQGRVVQLGLEINKIIASGEFETPVVAEDTKPEAEEDEAEGAKKKAKPMNAAAKQTLAAIKWVDEVLQLKDKFDNMWKKCFNEDTILETAITKSFSDFINLFDRCSEYVSLFIDDNLKRGIKGKTEVEIDEVLDKATTLLRYIQDKDMFERYYKKHLAKRLLLNKSESTDVEKQMISRMKLEIGNSFTTKLEGMFKDVTMSEELTQNYRNHINNLGDKDHKQIELSAIVLSTNCWPTEIIGGIPSSDEGPRQYCNWPPEMQKLQDSFKAFYLKDRNGRMLTWLGNLGNADIRCYFPAIPGETGPKSRERKYELNVNTYGMIILMLFNDLPDGATLSYEEIQERLNISDKELPRALMQLSGPPKSRVLLKKPGKPNELPTIGDVFTFNSSFVSKSHKIKVQAMGGQTSKVEGAEERRLTEERNDEHRGNVMDTVIVRIMKARKEFPHQQLVTEVISQLAQRFQPNINMMKRRIESLIEREYLERIEDAKVPTYKYLA

SEQ ID NO: 13639 - DNA, 2448 bp, Nasonia vitripennis
  CDS (1)..(2448)
atgtccaggttgggtagaaactcccaggttctggctactgactacagccaccatcatcagcaacagcagcagtcctcctgtgttaaaattgccaagcgaccaaggatccacaactccggcgagccagaggctctggacaataccatggctgaggcagctgctgctactacttcggccaatgcgcaaaacaagagaccaaacttttcactggctgtggctaatcctaatggcgtgaacaagatcacgcaaagcctggccactggaaaacctggcactgccaagaaacttatcatcaaaaattttaaagataaaccaaaacttcctgaaaactaccaagaggaaacatgggagaagctcagagaggcagtagttgctatacaaaccagtaaaagcatacgttattccctggaagaactttacaaagctgtggagaacatgtgtagtcataaaatggcatctactctctacagcaatttgacagtcctggtggaaactcatgtcaaggccaacatagagcaatttatagctgaatctatggaccgacacatttttctgaaaaaaatgaacgaatgctggcagtcccactgcaggcagatgatcatgattagaagtatatttctttacctagatagaacctatgttctacagaatcctagcatctcctctatatgggatatgggtctctatctattcagattgcacatagtgttaaataacctggtgcagacgcgcacagttgaggggctactaatgctgatcgagaaggagcgtcagggcgacaccgtcgatcgcactctgctcaagtcgttattgcgcatgctgtccgatttgcagatatatcaggacgcgtttgagtccaagttccttgtagccaccgagaggctctatgccgccgagggtcagagactcatgcaagaacacgacgtacccgagtacctcgctcacgtcgacaagcgtttgcaagaagagaacgagagactgcttcattatcttgatacctccacaaagtggtccttaatacacacagtggagaagcaattgttatctgagcacattaccagcattttgcaaaagggtctcagtggattactagatgagaacagaatcagcgatttgtccttgctttataacttgtacagtcgtataaaaaatggtttggtggagctttgcttgaatttcaacagttacataaagaaacgaggcaaaactatagtcatagatccagaaaaggacaagaccatggttcaggagcttctagattttaaggacaaaatggataatattgtcaacacgtgctttcacaggaacgaaaagtttggcaacagcttgaaggaggcttttgaggcttttattaaccagagagctaacaaaccagctgaacttatagccaaattcgtggattgcaagcttcgtgctggtaacaaagaggcgacagaggaggagctagaacgactgctcgacaaaatcatggtcttattccgcttcattcatggcaaggatgtgtttgaagccttctacaagaaagatttggcgaaacgactgctcgttggtaaatcggcttcggtcgacgctgagaagtccatgttgtccaaattgaaacaagaatgtggtggtggtttcactagcaagctggagggtatgttcaaagatatggaactgagcaaggacatcaacatcgcgttcaagcagtactcgggtaatctgcaaaatgagctaattgctagcaatcttgatctcactgtatcgatactgacgatgggttactggccaacttatccggtgatggaggtaacgctgccacccgaaatggttcagtatcaggatattttcaacaagttttatctaggcaagcacagtggcaggaagctacaatggcaaccgacccttggacactgtgttctgaaggcatggttcaatcagggtaacaaagagttgcaagtttcgttgttccaagctctggtactgattctttttaacgaggcagataatatgtcatttgaggaagtcaaggcagcgacaaatatcgaggatggtgagctaaggcgaaccctacaatcactggcctgcggtaaagctcgcgtacttcagaaaaatccaaaaggtcgcgatgttgctgataacgacagattcgtctttaatgccgagtttaccaacaaactttttagaataaagatcaaccagatacagatgaaggaaacgaatgaggaacagaaagctacggaagaaagagtgtaccaagacagacagtaccagattgatgcagcaatagttagaattatgaaaatgaggaaaactctgacgcataatcttcttataagtgaattgtacaatcaactcaaatttcctgtaaagcctgctgatctgaagaaacgaatagaatctctgattgatagagactacatggaaagagactgggacaatgccaatcagtacaactacgtcgcgtaa

SEQ ID NO: 13640 - protein, 815 aa, Nasonia vitripennis
MSRLGRNSQVLATDYSHHHQQQQQSSCVKIAKRPRIHNSGEPEALDNTMAEAAAATTSANAQNKRPNFSLAVANPNGVNKITQSLATGKPGTAKKLIIKNFKDKPKLPENYQEETWEKLREAVVAIQTSKSIRYSLEELYKAVENMCSHKMASTLYSNLTVLVETHVKANIEQFIAESMDRHIFLKKMNECWQSHCRQMIMIRSIFLYLDRTYVLQNPSISSIWDMGLYLFRLHIVLNNLVQTRTVEGLLMLIEKERQGDTVDRTLLKSLLRMLSDLQIYQDAFESKFLVATERLYAAEGQRLMQEHDVPEYLAHVDKRLQEENERLLHYLDTSTKWSLIHTVEKQLLSEHITSILQKGLSGLLDENRISDLSLLYNLYSRIKNGLVELCLNFNSYIKKRGKTIVIDPEKDKTMVQELLDFKDKMDNIVNTCFHRNEKFGNSLKEAFEAFINQRANKPAELIAKFVDCKLRAGNKEATEEELERLLDKIMVLFRFIHGKDVFEAFYKKDLAKRLLVGKSASVDAEKSMLSKLKQECGGGFTSKLEGMFKDMELSKDINIAFKQYSGNLQNELIASNLDLTVSILTMGYWPTYPVMEVTLPPEMVQYQDIFNKFYLGKHSGRKLQWQPTLGHCVLKAWFNQGNKELQVSLFQALVLILFNEADNMSFEEVKAATNIEDGELRRTLQSLACGKARVLQKNPKGRDVADNDRFVFNAEFTNKLFRIKINQIQMKETNEEQKATEERVYQDRQYQIDAAIVRIMKMRKTLTHNLLISELYNQLKFPVKPADLKKRIESLIDRDYMERDWDNANQYNYVA

SEQ ID NO: 13641 - DNA, 2325 bp, Nasonia vitripennis
  CDS (1)..(2325)
atgaagagtgctttgcctaaaaaggagagcaagatgcgcatcagggcatttcctacatccatggatgagagatacgtagaaaacatatgggcccttttgaaaaatgccatccaagaaattcaaaagaaaaataactccagccttagttttgaagaactctaccggaatgcatacacaatggttctccacaagtatggggagaggctgtacacaggattgaaggaagtcattacacagcatttagtgatgaaagtacgcaatgatgtccttgagtctctctacaacaattttttacaaaccttaaatcaagcatggaatgatcatcaaacttctatggtgatgattagagatatcctcatgtacatggatagagtttatgttcagcaaaataatgtggacaatgtatttgatttgggactaataatatttcgtgatcaggttgttagatatggatgtataagagatcatttacgtgacactctactatcaatgatagctcgcgaaagaaacggtgatattgttgaccgcattgcgataaaaaatgcatgtcaaatgttaatgctactaggtataaaaaatcgacaagtgtacgaagaagacttcgaacggccttttttacaacaaagcgtagagttttacaagatggaatctcagaaattcttagaagaaaatagtgcatctgtatacataaaacaagttgaagccagaatcactgaagaatcagaaagggcaaagcactatttggatgaatctacagaacctcggatagttgaagttgttgaagaggagttgattaagaaaaatatgaaaacaatagtcgaaatggaaaacagtggagttgtgcacatgcttcaaaacttgaagactcaggatcttgggtgcatgtacaaattattctctcgagtttctgatggtctagatactgtttgtggctgtgtatcgcagtatttaagagaacgaggacgcgcattagttcaagaagaacaagaatctagtactaatgcagttcaatttgtgcaaaatttgttggacttgaaagaccgttttgaacacttcctccatatttcgttcaacaatgacaaacaatttaagcaaatgattgcgtcagactttgaatactttttgaatttaaacacaaaaagtcctgaatacctttctttgttcattgatgacaagttaaagaaaggtcttaaaggcatgacagagcaagaaattgaaggcattttggacaaaacaatggtcttgtttagattccttcaggagaaagatgtgttcgaacgttattataaacaacacttagccaagcgacttttgctgaataaatctgtgtctgatgatagtgagaagaacatgatatcaaaattgaagactgagtgtggctgccagtttacatcgaaattagaaggcatgttcaaagacatcactgtcagtaatacgataatggaagagtttaaggaacatacgctagctaatggaatgacgttgagtggtgtggatttgagtgtacgtgttttaacaactgggttttggcccactcaagctgcaactcccaagtgcagtatgccttcggcacctcgtaatgcctttgatgcctttcgtcgtttttatctgggtaaacacagtggtcgtcagttgacattacaaccacaattaggttcggctgatttgaatgccactttttacgggcctcgaagagaggaaaatatgccagaatgttcatcaacttctccagggttcggaaacaacggtaacggtcagcgcagcagtggaaccatcaccacccgaaaacacatcattcaagtttcgacgtatcagatgtgtgttcttatgctcttcaataatagggaaaaattaacatacgaagagatacagaatgaaacggatatccctgaaagagatttaataagagcactgcagtccttggccatgggtaaagcaacacaacgagtgttgttaaaatacccccgaacaaaagaaatcgaaccgtctcattctttctgtgtaaatgataatttcagcagcaaactccatagagtaaaaattcagactgtggcagcaaaaggcgaatgtgaacctgagcggaaggaaaccagaagcaaagttgacgaagacagaaagcatgaaattgaggctgcaatagttcgtataatgaaggctcgtaaacgaatggcacacaacatactcgtaactgaagtaacagatcagttaagagcgagatttttaccttcaccagttattatcaaaaagcgcttagaaaatttaattgaacgagaatatttagcccgtacgccagaagacagaaaagtctatacgtacgtcgcttaa

SEQ ID NO: 13642 - protein, 774 aa, Nasonia vitripennis
MKSALPKKESKMRIRAFPTSMDERYVENIWALLKNAIQEIQKKNNSSLSFEELYRNAYTMVLHKYGERLYTGLKEVITQHLVMKVRNDVLESLYNNFLQTLNQAWNDHQTSMVMIRDILMYMDRVYVQQNNVDNVFDLGLIIFRDQVVRYGCIRDHLRDTLLSMIARERNGDIVDRIAIKNACQMLMLLGIKNRQVYEEDFERPFLQQSVEFYKMESQKFLEENSASVYIKQVEARITEESERAKHYLDESTEPRIVEVVEEELIKKNMKTIVEMENSGVVHMLQNLKTQDLGCMYKLFSRVSDGLDTVCGCVSQYLRERGRALVQEEQESSTNAVQFVQNLLDLKDRFEHFLHISFNNDKQFKQMIASDFEYFLNLNTKSPEYLSLFIDDKLKKGLKGMTEQEIEGILDKTMVLFRFLQEKDVFERYYKQHLAKRLLLNKSVSDDSEKNMISKLKTECGCQFTSKLEGMFKDITVSNTIMEEFKEHTLANGMTLSGVDLSVRVLTTGFWPTQAATPKCSMPSAPRNAFDAFRRFYLGKHSGRQLTLQPQLGSADLNATFYGPRREENMPECSSTSPGFGNNGNGQRSSGTITTRKHIIQVSTYQMCVLMLFNNREKLTYEEIQNETDIPERDLIRALQSLAMGKATQRVLLKYPRTKEIEPSHSFCVNDNFSSKLHRVKIQTVAAKGECEPERKETRSKVDEDRKHEIEAAIVRIMKARKRMAHNILVTEVTDQLRARFLPSPVIIKKRLENLIEREYLARTPEDRKVYTYVA

SEQ ID NO: 13643 - DNA, 2433 bp, Nasonia vitripennis
  CDS (1)..(2433)
atgagcgcggcttcgttggtaggcgtgcgacttaacctgtcaagttttggatatacttttagagaagagtcgagtataatacaaactgatatagagcaatatctcaagatgtcagggtatcgaagtagtcacagcagcaaccagggtccacctggtctcaaacaaatcgatcttgatcaaatttggggagatcttaaagaaggcattgagcaagtttacaataggcagtgcatgtccaagcctagatatattgaattatacacgcatgtttataactattgcacgagtgtgcaccaacaaataaactcaagcaggcaaagctcaaaaagtaaaaagggtcaaataactggaggtgcccaactagttgggctagagctttacaagcgactgcgtgaatttcttcgaaattatcttatttctttactcaagcaaggaattgatcttatggatgaagatgtactacagttttatacaagacaatgggaggaatatcagtttagtagtaaagtattaaacggtgtatgcgcatacctgaatcgtcactgggtacgccgagaatgcgaagaaggtcgcaaaggaatctatgaaatttatcaattagcattggtgacatggagggataatttgtttaaacacctcaatagacaggttaccaatgctgtcttgaaactgatcgagagagaaagaaatggagaaacaataaacacacgattagttagtggagttatcaattgttatgtagaactaggcctaaatgaagaagatccaggtgccaagggacaaacccttaccgtgtacaaaaattcatttgaaaatctattcttggaagatacggaaaggttttacactcgcgaaagttcggaattcctccgtcataatcctgttacggaatacatgaaaaaggtggatcataggttacaagaagagcagaaacgtgtccaagtttacctgcacataactacgcacgaaagattagcaaaaacgtgcgaaagagtactcatagaaaaacacctggacattttccatgcagagttccaaaatttgttggattctgataaaaactctgatttgggtacaatgtacaaattagttgcaagaataccaaatggtcttggtgaattgagaaatcttttggaaagtcacatagccaaccaaggtcttgcagctattgacaagtgtggtgactctgcagttaatgatcctaagatttacgttaacacgattttggaagttcacaagaaatataataaattagtactcgtttcatttagcaatgatagcggttttgtagcagccttagataaggcttgtggcagatttatcaacactaattctgtaactaaggcagcaaacagtagtagtaagtctccagaattgttagctaaatactgtgatgtactgcttaagaagagcagtaagaatcctgaagaagcagaactcgaagatacgcttaaccaagttatggttgtgtttaaatacatagaagacaaagacgtgtaccaaaaattctacagcaaaatgcttgcaaagagattggtgcaacacatgtctgctagtgatgatgctgaagcttccatgatatcgaaactaaagcaggcttgtggtttcgagtatacttctaaacttcagcgaatgttccaggatattggagtatcaaaagacttgaatgaacattttcgaagacatcttacgaattcggcggaacctttggatatagatttcagtatacaagttttatcgtcaggttcatggccattccaacaatcctttacattttcattaccaacggagctggaaagatcagttcacagattcacatccttctacagttctcaacacagtgggagaaagttaaactggttgtacaacatgtctaagggtgaactacatactaactgttttaaaaatcgctatacattgcaagcatcaaccttccaaatggcagtcctactgcaatataatacctcaacatcatggacaatacagcagttacacgagtctacacaaattaaaatggacttcctcttacaagtaattcaaattctactcaaagcaaagttacttgtaaccagtgatgatgagtctgagcttggacctacttcaacagtagatctttttactggttataaaaataaaaaattaagagtaaatatcaacataccaatgaagacggagcttaaaatagaacaggagacgacacacaaacacatagaggaagatcgaaagctccttattcaagcagctattgtcagaatcatgaaaatgcgtaaagttttaaagcatcaacaacttgttgcagaagttctgaaccaactgagtatcaggttcaaaccccgagtgcatgtcataaagaaatgtatagatattttaattgaaaaagagtatctggagcgaacggaaggccagaaggatacctacagctatctagcgtga

SEQ ID NO: 13644 - protein, 810 aa, Nasonia vitripennis
MSAASLVGVRLNLSSFGYTFREESSIIQTDIEQYLKMSGYRSSHSSNQGPPGLKQIDLDQIWGDLKEGIEQVYNRQCMSKPRYIELYTHVYNYCTSVHQQINSSRQSSKSKKGQITGGAQLVGLELYKRLREFLRNYLISLLKQGIDLMDEDVLQFYTRQWEEYQFSSKVLNGVCAYLNRHWVRRECEEGRKGIYEIYQLALVTWRDNLFKHLNRQVTNAVLKLIERERNGETINTRLVSGVINCYVELGLNEEDPGAKGQTLTVYKNSFENLFLEDTERFYTRESSEFLRHNPVTEYMKKVDHRLQEEQKRVQVYLHITTHERLAKTCERVLIEKHLDIFHAEFQNLLDSDKNSDLGTMYKLVARIPNGLGELRNLLESHIANQGLAAIDKCGDSAVNDPKIYVNTILEVHKKYNKLVLVSFSNDSGFVAALDKACGRFINTNSVTKAANSSSKSPELLAKYCDVLLKKSSKNPEEAELEDTLNQVMVVFKYIEDKDVYQKFYSKMLAKRLVQHMSASDDAEASMISKLKQACGFEYTSKLQRMFQDIGVSKDLNEHFRRHLTNSAEPLDIDFSIQVLSSGSWPFQQSFTFSLPTELERSVHRFTSFYSSQHSGRKLNWLYNMSKGELHTNCFKNRYTLQASTFQMAVLLQYNTSTSWTIQQLHESTQIKMDFLLQVIQILLKAKLLVTSDDESELGPTSTVDLFTGYKNKKLRVNINIPMKTELKIEQETTHKHIEEDRKLLIQAAIVRIMKMRKVLKHQQLVAEVLNQLSIRFKPRVHVIKKCIDILIEKEYLERTEGQKDTYSYLA

SEQ ID NO: 13645 - DNA, 2310 bp, Nematostella vectensis
  CDS (1)..(2310)
atggccacacgaggagctaaccctcacgggttacggcagatcaatttagatgaaatatgggacgatttgaaggaaggaatccagcatgtgtacaatcagcaaagtatgtctaaacaaagatacatggaactatatacacatgtatacaattattgtactagtgttcatcagcagtcgcagtctagggtacctaagcaaaagaaggctcccaatcaaggtggtgctcaatttgttggacatgagttgtataagaggttgaaggaattcctaaaatcataccttctcaatatgcaaaaggatggggcagatctgatggatgaatctgtattgagattttactcaagtcgctgggaagactatagattttcaagtaaggtgctaaatggtgtgtgtgcctacttgaacaggcactgggtacgacgagagtgtgatgaaggcaggaaaggcatttatgaaatatatcaacttgctctggttacatggagagaacatctattccgtccattaaataaacaagtcaccaatgcagtccttcgcctcattgaaagggaaaggaatggagagactattaacacaagattagttagtggagttattcagtgttatgttgaactgggcttgaatgaggaggaacaatcttctaaaggacctgccctcaccgtgtacaaacagtattttgagtctgtatttcttgaagatactgagcgtttctatacggcagagagtgtggagtttctacgggaaaaccctgttacagagtacatgaaaaaggctgaagcacgactgcttgaggaacaacgtcgggtgaatgtctaccttcacgagagtactcaagatgaacttgcgagaaagtgtgaacaagttcttatagaaaaacatttagacatattttatgctgaatttcaaaatttgctaaatgatgacaagaatgaagatctcggtcgtatgtacagcctaggctcaagaataccagatggactcgtccagctgcgaaccttactagaaaatcacatttgctaccagggtcttaatgcactagaaaaatgtggagaacaagcgtataatgtgagtactcctgcatcatatgttattattattatttttgtgtctaagatgtgtaattattattttattatgtctttcaagaatgatgctggctttgttgcagccttagataaggcctttggcaagtttatcaacagcaatgcagtaacaaagcaagctcaggcttcatccaagtcacctgaattacttgccagatactgtgattctttgctcaagaaaagttcaaaaaatcctgaagaagctgaactagaagacattttaaattctgtgatggttgtattcaaatacatagaggataaagatgttttccagaagttttatgccaacatgcttgccaagcgccttgtacaacacaactcagcatctgatgatgcagaggccagtatgatttccaaacttaagcaagcatgtggctttgagtacacatccaaactacagagaatgttccaagacataggagtcagcaaagacctgaatgacaagtttaaggctcacctagccaatacaggatcactagatttggattttaccattcaagtattaagttctggctcatggccattccagcagtcgtggaccttttcacttcctgctgagatggagaagagtcaccagaggttcaccacattctacagcagtcagcacagtgggcgtaaacttcactggctctatcacaagtccaagggtgagctggtcacaaactgttttaagaaccgctacactcttcaggcgtctacataccagatgggtgtgcttcttatgtttaacaccgctgacagctacacagtggagcaaatccaagaacagacgcagctcaagatggagcttcttatccaagtacttggaattctgctaaagactaaacttctgttgtgtgacacttgtgaagatgtcagtggattagaaccctcctctgtactcaaacttttctttgggtataagaataaaaaacttcgagtgaatataaatgtaccaatgaagacagaacagaggaatgagcaagaacaaacacacaagtacatagaagaagaccgcaagcttctgatacaggctgccattgtgaggattatgaagatgcgtaaaatgctcaaacatcaacctctgctggcagaggtgctgtcgcagctttctagtcgcttcaagccaagagtgccaaccattaagaagtgtatagatatcctgatagagaaggagtacctcgagcgcgtagagggagaaaaagatacgtacgcatatcttgcttga

SEQ ID NO: 13646 - protein, 769 aa, Nematostella vectensis
MATRGANPHGLRQINLDEIWDDLKEGIQHVYNQQSMSKQRYMELYTHVYNYCTSVHQQSQSRVPKQKKAPNQGGAQFVGHELYKRLKEFLKSYLLNMQKDGADLMDESVLRFYSSRWEDYRFSSKVLNGVCAYLNRHWVRRECDEGRKGIYEIYQLALVTWREHLFRPLNKQVTNAVLRLIERERNGETINTRLVSGVIQCYVELGLNEEEQSSKGPALTVYKQYFESVFLEDTERFYTAESVEFLRENPVTEYMKKAEARLLEEQRRVNVYLHESTQDELARKCEQVLIEKHLDIFYAEFQNLLNDDKNEDLGRMYSLGSRIPDGLVQLRTLLENHICYQGLNALEKCGEQAYNVSTPASYVIIIIFVSKMCNYYFIMSFKNDAGFVAALDKAFGKFINSNAVTKQAQASSKSPELLARYCDSLLKKSSKNPEEAELEDILNSVMVVFKYIEDKDVFQKFYANMLAKRLVQHNSASDDAEASMISKLKQACGFEYTSKLQRMFQDIGVSKDLNDKFKAHLANTGSLDLDFTIQVLSSGSWPFQQSWTFSLPAEMEKSHQRFTTFYSSQHSGRKLHWLYHKSKGELVTNCFKNRYTLQASTYQMGVLLMFNTADSYTVEQIQEQTQLKMELLIQVLGILLKTKLLLCDTCEDVSGLEPSSVLKLFFGYKNKKLRVNINVPMKTEQRNEQEQTHKYIEEDRKLLIQAAIVRIMKMRKMLKHQPLLAEVLSQLSSRFKPRVPTIKKCIDILIEKEYLERVEGEKDTYAYLA

SEQ ID NO: 13647 - DNA, 2280 bp, Aedes aegypti
  CDS (1)..(2280)
atgaatatgaccgaaaacgatcggaaacgggccaacttttcagcgctcagcaacacgaacggagcggttatcaagatgaccaccaacacgggaacgggaaagccaggggacatcaagaagatcgtcatcaaaaacttcagagccaagccgaccctgccagagaactatcaggagcacacatggcagaagctgcgggcggccgtggtcgccatccagacgtccacaccgatcgaatactcgttggaggaactgtaccaagccgtggagaacatgtgcagccacaagatggactcgcagttgtatgtcaatctgacggcgttggccgagcagcacgtcaaggcaaatatcactccgttccttgccgagtcggtcgataagttggtctatctgaaaaagatgaacgaatgctggcaatcgcactgtcagcaaatgatcatgattaggagcatcttcctgtatctcgacagaacgtacgtcctgcagaatcccacagttcactcaatttgggacatgggcttggagttgtttcgggatcatatagcaatgaacaccttggtacaggccaggacagtggaaggcattctaatactgatagaaaaagagcgaaatggagatacagtcgacagaactttgctgaaaagtcttctccgaatgctgtctgatctacagatttacaaggaagctttcgagcagaagttcctcattgcaacgaaacacctctaccagtcggaagggcaagcaaaaatggaagagctcgaagttccagaatatctgcagcacgtggagaaacgactgcaagaagaaaacgaacgtcttcttcactacctagacagctgtacgaaacatcagttgatcgtaacagtagaacgacaactcatcaccgaacacataaccggaattctgcagaaaggtttagaccagcttttagaagagaatcgcttgtcggatctcagtttgttgtattcactgttttcccgtgtgaaaaacggaacgaccgaactctgtgcatccttcaatgcctacatcaaaaagaagggtcgcacgatcgtcatcgatccggagaaggacaaatccatggttcaggacttgctggacttcaaggacaaactggacaacattgtcatcacgtgcttcgaacggaacgataaattctccaactccttgcgggaagcgttcgagtacttcgtcaaccagcgctcgaacaagccggcggaactgatagccaagtacgtggacatgaagctccgcgccggcaacaaggaagccaccgaggaagagctggagcagatcctggacaaaatcatggttcagttccggtttatccacggtaaggacgtgttcgaggcgttctacaagaaagatttggccaaacggttactcgtgggcaaatctgcttcggtggacgccgagaagagcatgctgtcgaagctgaagcaggagtgcggcggtgggttcacttccaagctggagggcatgttcaaggatatggaactgagtagggacatcaacatcgcatttaagcagcacatgggcaactcggagaacaaggacttgcagagcatcgacctgacggtcaacattctgacgatgggcttctggccgacgtatccggtggtggaggtcacactgcccccagagctgctccagtaccagtcagtgttcaacaagttctacctggcgaaacacagcgggcgcaagctccagtggcaaccgacgctcggacactgcgtactgaaagcacggttcgatgcgggacccaaagacctgcaggtgtcattgttccaatcgttagttctgctgttattcaactacaatcccactatatcgttcgaagatattaaggcgcaaataaatatagaagacggtgaaatgcgtcgcacacttcagtcgctggcctgcggcaaggctcgcgttctcacaaagatccccaaaggtcgcgaagtagaggacaacgacaagttccagttcaacaatgaatttacgaataagctctttaggattaaaatcaatcagatccagatgaaggaaacgacggaggaacagaaagccacagaagaacgcgtctaccaggaccgacaataccagatcgacgcagcgatcgtacgcataatgaagatgaggaaaacgctaagccacaatctacttatcagcgagttgtacaaacagctgactttcccagttaagccggctgacctgaaaaagcgaatcgaatccctgatcgatcgcgactacatggaacgggacaaggacaaccaaaaccaatataactacgttgcctaa

SEQ ID NO: 13648 - protein, 759 aa, Aedes aegypti
MNMTENDRKRANFSALSNTNGAVIKMTTNTGTGKPGDIKKIVIKNFRAKPTLPENYQEHTWQKLRAAVVAIQTSTPIEYSLEELYQAVENMCSHKMDSQLYVNLTALAEQHVKANITPFLAESVDKLVYLKKMNECWQSHCQQMIMIRSIFLYLDRTYVLQNPTVHSIWDMGLELFRDHIAMNTLVQARTVEGILILIEKERNGDTVDRTLLKSLLRMLSDLQIYKEAFEQKFLIATKHLYQSEGQAKMEELEVPEYLQHVEKRLQEENERLLHYLDSCTKHQLIVTVERQLITEHITGILQKGLDQLLEENRLSDLSLLYSLFSRVKNGTTELCASFNAYIKKKGRTIVIDPEKDKSMVQDLLDFKDKLDNIVITCFERNDKFSNSLREAFEYFVNQRSNKPAELIAKYVDMKLRAGNKEATEEELEQILDKIMVQFRFIHGKDVFEAFYKKDLAKRLLVGKSASVDAEKSMLSKLKQECGGGFTSKLEGMFKDMELSRDINIAFKQHMGNSENKDLQSIDLTVNILTMGFWPTYPVVEVTLPPELLQYQSVFNKFYLAKHSGRKLQWQPTLGHCVLKARFDAGPKDLQVSLFQSLVLLLFNYNPTISFEDIKAQINIEDGEMRRTLQSLACGKARVLTKIPKGREVEDNDKFQFNNEFTNKLFRIKINQIQMKETTEEQKATEERVYQDRQYQIDAAIVRIMKMRKTLSHNLLISELYKQLTFPVKPADLKKRIESLIDRDYMERDKDNQNQYNYVA

SEQ ID NO: 13649 - DNA, 2319 bp, Aedes aegypti
  CDS (1)..(2319)
atgagccgaatggcacagaaaaaggaaggcaaaatgcggattcgggctttcccgatgacaatggacgaaaagtatgtcgagtccatctggtcgctgctgaagaatgccatacaggagatccagaagaagaacaactcgggcctttcgttcgaggagttgtatcgaaatgcgtacaccatggtgctgcacaagcacggcgaacggttgtacaccggcctcaaggatgtcgttacgcaacatctggagacgaaggtacgggacgaggtgctacgcagcttcaattgtaatttcctgcagaccctgaaccaatcgtggaacgatcaccaaacgtcgatggtgatgatccgggatattctgatgtacatggatcgagtgtacgtgcagcagaacgacgttgacaatgtgtataatctggggctgattattttccgcgatcaggttgtccgatatggccgtattcgggatcacatgcgagagaccctgttgaatatggttatgtgcgagaggaagggggaagcgattgatcacattgcgatcaaaaatgcctgccaaatgttgatggttctcggaatcaacagccgatgggtgtacgaggaggacttcgagcgaccgttcctcacacagtcggcagccttctacaagctggagtcccagaagttcctctcggagaacagtgccagtgtgtacattcgaagggttgaggcacgtatcaccgaggaagccgagcgggcaaaactgtatttggacgagagcacggaatgtcggattgtggaagtcgtggaggatgagctcatcaagaaacacatgcgcacgatcgttgagatggagaactccggtgtggtgtacatgcttaagaacaccaaaacagaagatttggcctgcatgtacaaactgttctcccgtgtgaatggtggactgaaaacgattgccgattgcgtttcgcagcacctgcgttcgatgggcaagaatctggtaaaggaggaagacagcggaacgaatcccattacgtttgtgcaaaatctgttggatttgaaggatcgctttgaccatttcctacatcactcgttcaataacgacaaaatcttcaaaaacatgatatcgtccgactttgaacatttcctcaatctgaacagcaaatcaccggagtatttgtcgctgttcatcgacgacaagctgaaaaagggatgcaaagggatgtcggaacaagaaatcgaaacaatattggacaaaacgatggtattattcagatatttactggagaaggacgtatttgagcgctactacaaggcacatctagcgaagcgattactgctgaacaaatcggtcagcgatgattcggaaaagaatatgatatcaaaattaaagactgaatgcggttgtcaatttacctcaaaattggaaggcatgtttaaggacatgtcggtatcgaacaccgtgatggaggaattcaagaaccacattagcaatgatccatccgcgctggatggcgttgagctctcggttcgaattctcaccactggtttctggccaacacagtctgctacgccaaattgtaatataccgcttgccccgcggagggcatttgaaacgttcaagcgtttctacctggcgaagcattcaggacgacaactgacgctacaaccacagctcggcactgtttatatgaacgcagaattctacggcgtcaaagctgaaaaggaacctgtagaaggcggttgcagtagtactgctgccgttgccggttcgtccgctcctagcgtgtccctcggtgctcccagaaagcacgtcctacagctctcgacttatcagatgtgcgtgctgatgttgttcaacaaccgtgaacgtctgacgtacgacgagatccaacaggaaacagacatacccgggaaggatctgatccgggccttgcagtcactttcgatgggtaaacaacagcagcggttgctcgtgcgaacacccaaatcaaaggacatcgaaccgacgaatgtgttctacgtgaacgatgcattcgtatcaaaattccacaaggttaaaattcaaaccgtggccgccaagggcgagtcggaaccagagcggaaggaaactcgcagcaaagtggacgaagaccggaagcacgagatcgaagcggctatcgtgagaataatgaaggcgcggaagaaaatggctcacaatctactggtgtcggatgtgaccacacagctaaagagccggttcatgccctcgccggtgatcatcaagaagagaatagaggggctgatcgagcgagaatatctggcacggacgccagaggacaggaaggtttatgtgtatctagcttaa

SEQ ID NO: 13650 - protein, 772 aa, Aedes aegypti
MSRMAQKKEGKMRIRAFPMTMDEKYVESIWSLLKNAIQEIQKKNNSGLSFEELYRNAYTMVLHKHGERLYTGLKDVVTQHLETKVRDEVLRSFNCNFLQTLNQSWNDHQTSMVMIRDILMYMDRVYVQQNDVDNVYNLGLIIFRDQVVRYGRIRDHMRETLLNMVMCERKGEAIDHIAIKNACQMLMVLGINSRWVYEEDFERPFLTQSAAFYKLESQKFLSENSASVYIRRVEARITEEAERAKLYLDESTECRIVEVVEDELIKKHMRTIVEMENSGVVYMLKNTKTEDLACMYKLFSRVNGGLKTIADCVSQHLRSMGKNLVKEEDSGTNPITFVQNLLDLKDRFDHFLHHSFNNDKIFKNMISSDFEHFLNLNSKSPEYLSLFIDDKLKKGCKGMSEQEIETILDKTMVLFRYLLEKDVFERYYKAHLAKRLLLNKSVSDDSEKNMISKLKTECGCQFTSKLEGMFKDMSVSNTVMEEFKNHISNDPSALDGVELSVRILTTGFWPTQSATPNCNIPLAPRRAFETFKRFYLAKHSGRQLTLQPQLGTVYMNAEFYGVKAEKEPVEGGCSSTAAVAGSSAPSVSLGAPRKHVLQLSTYQMCVLMLFNNRERLTYDEIQQETDIPGKDLIRALQSLSMGKQQQRLLVRTPKSKDIEPTNVFYVNDAFVSKFHKVKIQTVAAKGESEPERKETRSKVDEDRKHEIEAAIVRIMKARKKMAHNLLVSDVTTQLKSRFMPSPVIIKKRIEGLIEREYLARTPEDRKVYVYLA

SEQ ID NO: 13651 - DNA, 2340 bp, Aedes aegypti
  CDS (1)..(2340)
atgtctagattaaactctcatggagcgacggggctacggaatattaacctggaagagatatgggccgacctggagggaggcataaaacaggtgtataaacaagagcaaagcctgagccccgcccgttatatgcagctttacacccatgtatacaattactgcactagcgttcatcaacaaccggctaaccggcagtcttcatccaaggtctccaagaaaggaacggcaattccttctggcggcgctcagctcgtcggtcaggagttgtacaagcgattgaaggagtttctcgaatgctatctgatcaaactgcaggaaaatggcatcgaccttatggacgaggaagtcttgagcttctacacgaagcgatgggaagagtaccagttttcgagcaaagtgttgaatggcgtttgcgcctatctcaaccggcactgggtgaaacgtgagtgcgaagaaggtcgcaaggatgtgtacgaaatctatcagctagcattggtgacgtggcgcggaaacctgttcaaacagctgaacaaacaggtgaccaacgcggtcctgaagctgatcgagcgggagcgtaatggggaaaccatcaactcacgtttggtgtccggtgtgattaactgctacgtcgagttgggactgaacgaagaagatccgaacgcgaagggacagaacctttccgtttacaaggaaagtttcgaaaatatcttcctggaggataccgaaatgttctacactcgcgaaagtgcggaattcctgcgggagaatcccgtaaccgaatacatgaagcgcgtggagctacgactgaatgaggaacagaagcgtgtgcaggtgtacttgcacgaaagcactcaggaccgattggccaagacgtgcgagcgagtgctgatccagaaacatttggaacagttccgcactgagttccaaaacttgcttgattctgacaagaattccgatctgcgccgcatgtattcgttggtggctcgtataacagagggcctggtggaattgaaggcaattctggaaacccacatccacaaccaaggcctggccgcaattgccaagtgtggtgaagctgcgttgaacgatcccaaaatctacgtccaaaccatcctggaggttcacaagaagtacaatgcactggtacttaccgcattcaacaatgacagtggatttgtggctgccctggacaaagcatgcggtaaattcatcaacacaaacgctgttacggaggccagtaagagcgcaagcaagagtccggaactgttggccaagtactgtgatttactgctgaaaaagtccagcaaaaacccagaggaagccgagctggaggacaccctgaatcaagtgatggttgtcttcaaatacatcgaagacaaggacgtgttccagaagttctacagtaagatgctggccaagcgcctctgtcatcacatgtccgccagcgacgatgccgaagcgtcgatgatttccaaactgaagcaggcctgcgggttcgagtacaccagcaagctgcagcggatgttccaagacattggagtttcgaaggatctcaacgaacaatacaaaacgtacgtcaagggactgcgtgaggcaaccaggcaacaaacgggcaatgaaatcgattttagcatactggtgctttccagtggctcctggccattcaatcagagtttcacgttttcacttccatttgagctggagcaatctgtacatcgatttaacagcttttacgccaagcaacattccggacgaaagctcaactggttgtacaacatgtgtcgcggtgagctgatcacaaactacttccgaatgcggtacactcttcaggccagtacgttccagatggccgtcttactacagttcaacgaacaagaatcgtggactattcaacagttgagtgagaataccggcatcaatcatgaaaatctgatccaggtattgcagattctgcttaagacgaaactacttcaatcatacgacgatgaagccaatctccagcctgcctcttctgtggaactgaatcagggattcaaaaacaaaaaacttcgcatcaacatcaacttcccccttaagacagaactgaaggtagagcaggaggcgactcacaaacacatcgaagaggatcgcaagattctgatacaggcagcgatcgtgagaatcatgaaaatgcgcaaggctctgaaccacacccaccttgtcggagaagttctgaatcaactgtcgacacgtttcaagcccaaggtccaggtgatcaagaaatgcatcgatattctgatagagaaggaatatctcgaacgtcaagaaggacagaaagacacatacagctatctggcttga

SEQ ID NO: 13652 - protein, 779 aa, Aedes aegypti
MSRLNSHGATGLRNINLEEIWADLEGGIKQVYKQEQSLSPARYMQLYTHVYNYCTSVHQQPANRQSSSKVSKKGTAIPSGGAQLVGQELYKRLKEFLECYLIKLQENGIDLMDEEVLSFYTKRWEEYQFSSKVLNGVCAYLNRHWVKRECEEGRKDVYEIYQLALVTWRGNLFKQLNKQVTNAVLKLIERERNGETINSRLVSGVINCYVELGLNEEDPNAKGQNLSVYKESFENIFLEDTEMFYTRESAEFLRENPVTEYMKRVELRLNEEQKRVQVYLHESTQDRLAKTCERVLIQKHLEQFRTEFQNLLDSDKNSDLRRMYSLVARITEGLVELKAILETHIHNQGLAAIAKCGEAALNDPKIYVQTILEVHKKYNALVLTAFNNDSGFVAALDKACGKFINTNAVTEASKSASKSPELLAKYCDLLLKKSSKNPEEAELEDTLNQVMVVFKYIEDKDVFQKFYSKMLAKRLCHHMSASDDAEASMISKLKQACGFEYTSKLQRMFQDIGVSKDLNEQYKTYVKGLREATRQQTGNEIDFSILVLSSGSWPFNQSFTFSLPFELEQSVHRFNSFYAKQHSGRKLNWLYNMCRGELITNYFRMRYTLQASTFQMAVLLQFNEQESWTIQQLSENTGINHENLIQVLQILLKTKLLQSYDDEANLQPASSVELNQGFKNKKLRININFPLKTELKVEQEATHKHIEEDRKILIQAAIVRIMKMRKALNHTHLVGEVLNQLSTRFKPKVQVIKKCIDILIEKEYLERQEGQKDTYSYLA

SEQ ID NO: 13653 - DNA, 2235 bp, Chlamydomonas reinhardtii
  CDS (1)..(2235)
atggcggaccgcaagcctatcgagctggcagaaggatggagctttatggagcagaaaggcatccagaagctcatccgcttgctggagggagagccagaggaccaatttaacgcggagcagtatatgcacctgtacacgactatctacaacatgtgcacccagaagccgccgcacgactattcggagcagctgtacagcaagtacagggacgcgttcaacaagtacataaacgagaaggtgctgccctctctgcgcgagcaccgcgacgaggtgctgcttaaggagctgtaccagcgctggggcaaccacaagctcatggtgcgctggctgtcgcgcttcttcaactacctggaccggtactacgtgctgcgccactctctgcacccgctcaaggacgtgggcctgctgtgcttcaaggacctggtgtacgtggagatcaagaagcgcaccaaggacggcgtgctgctgctggtggagaaggagcgcgagggcgagctggtggaccgcgcgctggtcaagaacatcctgggcatctttatcgagctgggcatgagcaacatggactgctacgagaaggactttgaggagtacctgctcaccgagacgtccgcgttctatcgccgcaaggcctcgcagtggattgagcaggactcgtgccccgactacatgctcaaggcggaggagtgcctgcgcctggaggaggagcgcgtggacaactacctacacgccaccacgcgcaacaagctgctcaaggaggtggagacggagctgctgtccaactacgagacgcggctgctgaccaaggagcacagcggctgcgcggcgctgctgcgggacgacaagacggaggacctggctcgcatgtaccgcctgttccagcgcatccccaagggcctggacccggtagccgacatcttcaaggagcacgtggacagcgaaggcatgaagctggtcaaggaggcggtggagctggcgaaggagaagcaggccaagaccggtcccagccgcgacaccggcaccagcgcggagcagcagtacgtgcgcgccgtcatcgacctgcatgacaagtacctgcagtacgtgtccacctgcttctgcaactcgtcgctgttccacaagagcctgaaggaggcgtttgagaacttcgtaaacaagtcggtggcgggtagcaccagtgccgagctcatggcgtccttctgcgacaaccttctcaaaaagggtggcagcgagaagctgtcggacgaggccatcgaggagacgctggagaaggtggtcaagctgctggcgtacgtgagcgacaaagacatgtttgcggagttctaccgcaagaagctgtctcggcggctgctgcaggacaagtccgccagtgacgaccacgagcgctcgctgctgtcgcgcctcaagcagcagtgcggcgcgcagttcacgtccaagatggagggcatggtgacagacctgcagctggccaaggagaagcagcagcacttcgacgactggctcaagaagggcagcaagcttcccattgacctgtccgtgacggtgctgaccacgggcttctggcctacctacaagtccatcgacgtggcactgccgcgcgagatggtggagggcgtggaggtgtaccgctcctactacgactccgactccaagcaccgcaagctgacgtggatctacacgctgggcacagcggtgctgcggggcaacttcgactccaagcccatcgagatgcagatgaacacgctgcaggcggcgctgtgcatgctgctcaacgacgtggacgagctgagctacggcgagatccaggagcggctgcgcctgcccgatgacgacctgcagcgcctgctgcactcgctggtctgcgccaaatacaagatcattaagaaggatccggacggcaagtccattggcaagtcagacaagttcgcgttcaacaaccgcttcactgacaaaatgcgccgcatcaagatccctttgccgcctctggacgagaagaagaaggtgatggaggatgtggacaaggaccgccgctacgccatcgacgccgccatcgtgcgcatcatgaagagccgtaaggtgcttcagcaccagacgctggtgatggaggtgatccagcagctgcagcgcatgttcaagcccgacctcaagctgatcaagaagcgcatcgaggacctcatccagcgcgagtacctggagcgcgacaaggacaacccgaccctgttcaagtacctggcctag

SEQ ID NO: 13654 - protein, 744 aa, Chlamydomonas reinhardtii
MADRKPIELAEGWSFMEQKGIQKLIRLLEGEPEDQFNAEQYMHLYTTIYNMCTQKPPHDYSEQLYSKYRDAFNKYINEKVLPSLREHRDEVLLKELYQRWGNHKLMVRWLSRFFNYLDRYYVLRHSLHPLKDVGLLCFKDLVYVEIKKRTKDGVLLLVEKEREGELVDRALVKNILGIFIELGMSNMDCYEKDFEEYLLTETSAFYRRKASQWIEQDSCPDYMLKAEECLRLEEERVDNYLHATTRNKLLKEVETELLSNYETRLLTKEHSGCAALLRDDKTEDLARMYRLFQRIPKGLDPVADIFKEHVDSEGMKLVKEAVELAKEKQAKTGPSRDTGTSAEQQYVRAVIDLHDKYLQYVSTCFCNSSLFHKSLKEAFENFVNKSVAGSTSAELMASFCDNLLKKGGSEKLSDEAIEETLEKVVKLLAYVSDKDMFAEFYRKKLSRRLLQDKSASDDHERSLLSRLKQQCGAQFTSKMEGMVTDLQLAKEKQQHFDDWLKKGSKLPIDLSVTVLTTGFWPTYKSIDVALPREMVEGVEVYRSYYDSDSKHRKLTWIYTLGTAVLRGNFDSKPIEMQMNTLQAALCMLLNDVDELSYGEIQERLRLPDDDLQRLLHSLVCAKYKIIKKDPDGKSIGKSDKFAFNNRFTDKMRRIKIPLPPLDEKKKVMEDVDKDRRYAIDAAIVRIMKSRKVLQHQTLVMEVIQQLQRMFKPDLKLIKKRIEDLIQREYLERDKDNPTLFKYLA

SEQ ID NO: 13655 - DNA, 2178 bp, Chlamydomonas reinhardtii
  CDS (1)..(2178)
atgaagaaggggccgattaaaatcgagcccttcaggcacccagtgaccgtcgacccgcagtatgcagacaagacgtggaaggtgctagaggatgccattcgggagatccacaaccaaaatgccagtgggctcagctttgaggagctgtaccgtaacgcctacaacatggtgctgcacaagtacggcccgcggctgtacgaggggctcatccgcacgctgacggcgcacctgacggaggtggcgaaaaagatcgaggagaaggagggcgcgcccttcctgcgcgagctgaagaagcgctgggacgagcacaccaagagctcgcagatgatccgcgacatcctcatgtacatggaccgcacgttcgtggtgcagcagcagaagacgccggtgttcacgctgggcctggagctgtggcgcgatgtggtggtgcgcaaccgcgccatcagcgagcgcctgctggccatcgtgtcgtccctcatcatgaaggagcgccagggtgaggtgatcgagcgcggcctgatcaagagcgtgacgcagatgctgggggagctggggcacgcggtgtacgtggaggactttgagaagcccttcctggcggccgcggcggagttctaccggaaagaggctcaggagtacatcaccagcagcgactgccccgagtacctgcgcaaggcggaggcgcggctgggcgaggaggcggagcgctgcggcgcctacctggacgccaacagcaccgagcccaagatcacgcgcgtggtggagacggagctgctcaaggcgcaggcggcgaggacaacgctggccataacttcaaacgcgccgttcctggtccatcctgtcccacccctgctcctcccgatgccgccgcaggtgcggcacatgctgtgcgagcacgtgaaggaggtggggcgcgcgctggtgagcgacccggagcgcagcaaggacccggtggagtacgtgcaggcgctgctggacatgcgcgacaagtacgagcgcatcatcacgcaggccttcgcggacgataagacgttccgcaatgcactcaaccaggcgttcgagcactttgtgaacctcaacgtgcgctcgcccgagttcatctcgctcttcatcgacgacaagctgcggcgcggcatcaaggggctgagcgacacggacgtggagggggtgctggacaaggtcatggcgctgttcaggtacctgcaggagaaggacgtgtttgagaagtactacaagcagcacctggccaagcgcctgctcagcggccgcaccacgtcggacgacgcggagcgcaacttgctggtcaagctcaagaccgagtgcggctaccagttcactagcaagctggagagcatgttcacggacatcaagaccagccgcgacaccatgaacgagttccgcacgcgcctggtggagaccggcaagctggaggcggagctgggcggcatcgacctgcaggtgcaggtgctcaccaccggctcctggcccacgcaggcgccgtccaagtgcaacctgccgcgcgagctggaggccgcctgcgagtccttccgcaacttctacctgtccacacacagcgggcggcgcctcacgttccagcccaacatgggcacagcagacctccgagccgtgttcggcgctgggcggcggcacgaactgaacgtgtccacataccagatgtgtgtgctgctgttgttcaacgaggctgactcgctcagctaccgcgacatcgcgcaggcgacggaaatcccggcaccggacctgaagcgcgcgctgcagtcgttggcgtgcgtcaaggggcggaacgtgctgcgcaaggagccggcgggcaaggacgtggcggacagcgacgtgttcttctacaacgacaagttcaccagcaagctcatcaaggtcaagatcagcaccgtggccgccaccaaggagggcgagagcgagaaggcggagacgcggcaaaaggtggaggaggaccgcaagccgcagatcgaggccgccatcgtgcgcatcatgaaggcccgccagcggctcgaccacaacaccatcatcaccgaggtgacgcgccagctgcaggcgcgctttgtgcccaatcccgccaccatcaagaagcgcatcgagagcctcatcgagcgcgagttcctggcccgtgacgaggccgaccgcaagttctatacctacgtggcctaa

SEQ ID NO: 13656 - protein, 725 aa, Chlamydomonas reinhardtii
MKKGPIKIEPFRHPVTVDPQYADKTWKVLEDAIREIHNQNASGLSFEELYRNAYNMVLHKYGPRLYEGLIRTLTAHLTEVAKKIEEKEGAPFLRELKKRWDEHTKSSQMIRDILMYMDRTFVVQQQKTPVFTLGLELWRDVVVRNRAISERLLAIVSSLIMKERQGEVIERGLIKSVTQMLGELGHAVYVEDFEKPFLAAAAEFYRKEAQEYITSSDCPEYLRKAEARLGEEAERCGAYLDANSTEPKITRVVETELLKAQAARTTLAITSNAPFLVHPVPPLLLPMPPQVRHMLCEHVKEVGRALVSDPERSKDPVEYVQALLDMRDKYERIITQAFADDKTFRNALNQAFEHFVNLNVRSPEFISLFIDDKLRRGIKGLSDTDVEGVLDKVMALFRYLQEKDVFEKYYKQHLAKRLLSGRTTSDDAERNLLVKLKTECGYQFTSKLESMFTDIKTSRDTMNEFRTRLVETGKLEAELGGIDLQVQVLTTGSWPTQAPSKCNLPRELEAACESFRNFYLSTHSGRRLTFQPNMGTADLRAVFGAGRRHELNVSTYQMCVLLLFNEADSLSYRDIAQATEIPAPDLKRALQSLACVKGRNVLRKEPAGKDVADSDVFFYNDKFTSKLIKVKISTVAATKEGESEKAETRQKVEEDRKPQIEAAIVRIMKARQRLDHNTIITEVTRQLQARFVPNPATIKKRIESLIEREFLARDEADRKFYTYVA

SEQ ID NO: 13657 - DNA, 2349 bp, Chlamydomonas reinhardtii
  CDS (1)..(2349)
atgtcagcagtaagaggcaagggcggggccccgcttgggggtctcgcccctgtcgcaggaagcgcgaacacgcagcaggcgaagaagctggtcatcaagccgcttaaagtcaagcccgagctccccgccaacttcgaggagtcgacatggagcaagctgcgcgattgcatcattgcggtgcattgcaaacgccccgtgtccaacagcctggaggagctgtacacggcggttcaggatatgtgcatgcataagatggcggataagctttacacccgcctgcaaaaggagtgtgatgcgcacatcgcggcgcacgtgggctcgctgggcgactgcctgggtctggacgcggtgccgtacctggaccgtgtggacagcgtgtggcaggaccactgcagccagatgctgctgacgcggcagatcttcctgtacctggaccgcacgcacgtgctgcagctcagcagcagcgccacgcccgtcaagtccatattcgacatggggctggcgctgttccgcacacacctggcggagcggccgcagatcaaggagcgcacagtagaggggctgctggagctggtgcagcgggagcgctgcggcgaaggcgtgaaccgggccctgctgcagcggctgctgcgcatgctgtcctcactgggcatctacacggacgccttccatgagccattcatgaaggcgagcgggcagttctaccggtccgagggcgagcggctagtggcggagctggacgtgccggcctacctcaaacactgcgagacgcggctgggcgaggagtttgagcgctgcagcgagtacctggatgcctcctcgcgccgcccgctcatcgccgcggtggagggcgcgctggtggcgcggcacaccggcccgctgctggaccgggggctggggccgctgctggacgggcaccgtgtgggtgacctgggccgcctgtatgggctgctggggcgggtaggcgcgagcgaggcgctgcgggcggcgttccgcgagtacgtgcgctccaccggcctggcgctggtcaaggacgaggagaaggacaaggagatggtggagcggctgctggacctcaagtcgcggctggacgaggtggtggcgggcgccttcggccgcagcgaggccttcgccgccaccctcaaagaaagctttgagtacttcatcaaccagcgcgccaacaagcccgcggagctcatcgccaagttcattgacgcgcggttgcgggcgggtgggcgcggggcagcggcaggcgcggcgggtgccggcggcagcggggcgggcactggcggcagtgaggaggagctggaggcggcactggaccgggcactcatactgttcaggtacatccagggcaaggacgtgttcgaggccttttacaagaaggacctggccaagcgcctgctgctggggcgcagcgccagtgtggacgccgagaaggccatgattgcaaagctaaaggcgaggcggcgcagcggcgggcgggcacgggcgcgggcgcgggggcgattgctgcaacccagccagttcactgccaagctggagggcatgttcaaggacgtggagctcagcgacgacgtcatggcggccttcaggggggcgccggcggcggcggggctgccgtccggcgtggacgtggcagtgtctgtgctcaccagcggctactggcccacctaccccgtcacagaggtcaagctgccagaggtgctggaccgcgccggtgcggtgttccgcgacttctacctgtccaagtacagcgggcggcggctggtgtggcagcacagcctgggcagctgcatgctgagggccagcttccccaagggcatgaaggagctgtcagtcagcaccttccaggctgcggtgttgatgttgttcaatgacactgacacgctgtcgtacaaggacgtgcttgcgggcaccgggctggaggagaaggagctcaagcgcacgctgcagagccttgcgtgcggcaaggtgcgcgtgctgaccaaggagcccaagggccgtgacgtgaacgacgacgacagcttctccttcaacacgggcttcacggagaagctgttccgcatcaagatcaactccatccagatgaaggagacggaggaggagaacaagaagaccaacgagcaggtgctccaagaccggcagtaccagatcgatgcggcgctggtgcgcatcatgaagacgcgcaagacgctgagccacaagctgctggtggcggaggcgctgcagcagctcaagttcccgctcaaggcggcggacctcaagaagcgcattgagagcctcattgaccgcgagtatctggcacgagacgccaacgatgcaaacgtgtacaactatctcgcctga

SEQ ID NO: 13658 - protein, 782 aa, Chlamydomonas reinhardtii
MSAVRGKGGAPLGGLAPVAGSANTQQAKKLVIKPLKVKPELPANFEESTWSKLRDCIIAVHCKRPVSNSLEELYTAVQDMCMHKMADKLYTRLQKECDAHIAAHVGSLGDCLGLDAVPYLDRVDSVWQDHCSQMLLTRQIFLYLDRTHVLQLSSSATPVKSIFDMGLALFRTHLAERPQIKERTVEGLLELVQRERCGEGVNRALLQRLLRMLSSLGIYTDAFHEPFMKASGQFYRSEGERLVAELDVPAYLKHCETRLGEEFERCSEYLDASSRRPLIAAVEGALVARHTGPLLDRGLGPLLDGHRVGDLGRLYGLLGRVGASEALRAAFREYVRSTGLALVKDEEKDKEMVERLLDLKSRLDEVVAGAFGRSEAFAATLKESFEYFINQRANKPAELIAKFIDARLRAGGRGAAAGAAGAGGSGAGTGGSEEELEAALDRALILFRYIQGKDVFEAFYKKDLAKRLLLGRSASVDAEKAMIAKLKARRRSGGRARARARGRLLQPSQFTAKLEGMFKDVELSDDVMAAFRGAPAAAGLPSGVDVAVSVLTSGYWPTYPVTEVKLPEVLDRAGAVFRDFYLSKYSGRRLVWQHSLGSCMLRASFPKGMKELSVSTFQAAVLMLFNDTDTLSYKDVLAGTGLEEKELKRTLQSLACGKVRVLTKEPKGRDVNDDDSFSFNTGFTEKLFRIKINSIQMKETEEENKKTNEQVLQDRQYQIDAALVRIMKTRKTLSHKLLVAEALQQLKFPLKAADLKKRIESLIDREYLARDANDANVYNYLA

SEQ ID NO: 13659 - DNA, 2205 bp, Physcomitrella patens subsp. patens
  CDS (1)..(2205)
atgaatcaggctaagaagaagaatttcaagatagagccgttcaagcacaaggtcgaaatggaccctaagtatgccgaaaaaacctggaagattctggaggatgctattcatgagatctataaccacaatgccagtgggctgagctttgaggaattgtacaggaatgcgtacaacatggtgctccacaagtatggagagaaactctactcaggagttgtgacgacaatgacgcagcatttgcgggagatagctcgaattgttgaagcagctcaagggggtttgtttttggaagagttggatgtgaagtggcgtgagcataacaagtctcttcagatgatccgagatatattgatgtacatggataggacatttgtgaacaatttcaacaagaccccagtgcatgagttaggtttgaatctgtggcgagatcacattgtgaggtcaccgaagatacgggatcggctcttgcgtacactgttagaccttgtgcacagagagcggacaggagaagtaatcaaccgaggccttatgcggaacattacgaagatgcttgtcgagttagggactaacgtatatcaagaagattttgaaagaccatttttggatgcagcatctgatttttacaggttggaatctcagcagctcattgagactagtgactgcccagattatctgcgcaaagctgagaagcggttgaatgaggaaatcgaaagagtagcacattacctagattccaaaagtgaggcaaagataacacaagttgtggagagggaggttattgggaaccgcatgaaacttttggtggagatggagaattctggtctaatttccatgttgatcgacgataagtacgatgatctaggaaggatgtacagtctgttccgtcgaatttccactggtttgcaaacaatgagggagctcatgactgcccacctacgtgagacgggaagacagcttgttactgatccggaaaggctgaaagatccagttgagttcgttcagcgcctacttgacgaaaaagacaagtacgataggatcattcagcagtccttcaacaatgacaagatgtttcagaacgctctgaattcctcgttcgaatatttcatcaatttgaatattcgatcacctgagtttatttccttatttgtagacgacaaattgaggaagggattaaaaggtgtgagtgaagaggacgtggagttggtattggataaggtaatgatgttgttccggtatttgcaagagaaagatgtgttcgagaagtattacaaacagcacctggcaaagaggttgctgtctggcaggactgtgtcggatgatgcagagcgtagtcttattgtgaagctgaagacggaatgtggatatcagttcacgtcgaaactggaggggatgttcacggacatgaagacatctcgggataccatgcagggattcaatgcaacatcggctggtactgaagggaacgaggggcctacccttactgtgcaagtactgaccactggttcatggccaactcagtcaggtgcccgctgtaacatgccaacggagattctagcaatgtgcgacaaattcaagatgtactatttatcaacccatacaggtcggcgtttgacatggcaaacaaacatgggtactgcagatttgaaggccacatttggggatggaaataaacacgagctgaatgtatctacgtaccagatgtgcattttgtatcttttcaatcaggctgaccgtcttacgtataaggagattgagcaagcaactgatataccagcactggatctgaagaggagtctgcaatcgttggcatgtgtgaaagggaagaatgtgttgagaaaggaacccatgagcaaggatataagcgaggacgacgtttttgtatttaatgacaagttctctagcaagttttacaaagtcaaaataagcaccgtcgtggctcagaaggagagtgaacctgagaagcaagagacacgtcaaaaggtcgaggaagataggaagcctcaaatcgaagcagctattgtgagaatcatgaagtcaagacgtctccttgaccacaataacattattagcgaggtaacgaagcagctccaagctcgctttatgcccaatcctgctgtgatcaagaagcgcatcgagtctttaattgagagggagttcttggaaagagatcgcgtagaccgaaaattgtatcggtatctcgcttga

SEQ ID NO: 13660 - protein, 734 aa, Physcomitrella patens subsp. patens
MNQAKKKNFKIEPFKHKVEMDPKYAEKTWKILEDAIHEIYNHNASGLSFEELYRNAYNMVLHKYGEKLYSGVVTTMTQHLREIARIVEAAQGGLFLEELDVKWREHNKSLQMIRDILMYMDRTFVNNFNKTPVHELGLNLWRDHIVRSPKIRDRLLRTLLDLVHRERTGEVINRGLMRNITKMLVELGTNVYQEDFERPFLDAASDFYRLESQQLIETSDCPDYLRKAEKRLNEEIERVAHYLDSKSEAKITQVVEREVIGNRMKLLVEMENSGLISMLIDDKYDDLGRMYSLFRRISTGLQTMRELMTAHLRETGRQLVTDPERLKDPVEFVQRLLDEKDKYDRIIQQSFNNDKMFQNALNSSFEYFINLNIRSPEFISLFVDDKLRKGLKGVSEEDVELVLDKVMMLFRYLQEKDVFEKYYKQHLAKRLLSGRTVSDDAERSLIVKLKTECGYQFTSKLEGMFTDMKTSRDTMQGFNATSAGTEGNEGPTLTVQVLTTGSWPTQSGARCNMPTEILAMCDKFKMYYLSTHTGRRLTWQTNMGTADLKATFGDGNKHELNVSTYQMCILYLFNQADRLTYKEIEQATDIPALDLKRSLQSLACVKGKNVLRKEPMSKDISEDDVFVFNDKFSSKFYKVKISTVVAQKESEPEKQETRQKVEEDRKPQIEAAIVRIMKSRRLLDHNNIISEVTKQLQARFMPNPAVIKKRIESLIEREFLERDRVDRKLYRYLA

SEQ ID NO: 13661 - DNA, 2238 bp, Physcomitrella patens subsp. patens
  CDS (1)..(2238)
atgactgtgagtagtagtcctggaatcgggactacagcgaacttatcacggaagaaggccactccaccgcagcctgcgaggaagttggtaatcaagcctttcaaagagaaaccaaagctgcctaaagacttcgaagaagtgacatgggccaagctcagagaagccgtaactgcaattcacttaaagcagcccgtgaattgcagtttagaggagctatatcgggctgtagaggacctctgccttcacaagatggcagggaatttgtacaggagactgcagcaggagtgtgaaagtcacatttcagtcaagctgcgagaccttgtaggacgcagtcctgattctgtggtgttcctgtctcatgttgaaagttgctggcaagatcattgcgaccaaatgcttcttatccgaagcattgcgctctatctggatcgaacctatgttatcccgaattcaggtgttcgatcgttgtgggatatgggtttgcaacttttccgccgccatctttcagcttgccctgaagttgagtccaagactgtctctggtcttctcacgcttatcgagaaggagaggatgggagagactgtggatcggagtttactgaaacacttgctacgaatgtttagtgctctttgtatatattcagagagctttgagaggcggttcttagattgtactgccgatttctatgcagctgaggggatacgctttatgcagcaaacagatgtgcctgattatcttaaacatgttgagaatcgacttcatgaagagaatgagcggtgcctgctctatctggatggaagtactcggaaatcactggtggctactgctgagaaacaacttcttagtcgtcatacaactgcaattctggagaaggggttcagcatgttgatggatgcgaatcgtttggcagatcttcaacggatgtacatgttgtttgcacgggtgaataccttggagtccttgaagatggccctgagcacttatatcaaggcgacgggaaatagcactgtgatggatgaagaaaaggataaggatatggtgtcttggcttttagatctgaaggcccgacttgatgctatctgggaagagagcttctttaggaatgaaactttttccaacactttgaaggatgcgttcgagcatctgatcaatctgcgtcagaatcggcctgctgagcttattgctaaattcattgatggaaagctgcgttctggcaataagggaacctcagaagaggagctggagggcattcttgataaagtgctggtgctttttagattcattcagggtaaagatgtatttgaagctttctacaagaaggatcttgctaagcgcttgcttctaggaaagagcgcctccattgatgcagagaaatccatgatatcaaagctcaagacggaatgtgggagtcagttcacaaacaaactggaaggaatgttcaaggacatcgagctttctcgagaaatcaacgagtcatttaggcagtctgctcaggcacggctaaagctcccctccggaattgagatgaacgttcacgtcctcactactggctattggcctacatatccacccatggaggttaggcttccacgcgagctcaatgtgtatcaggacatattcaaggagttttatctaagtaagcacagtgggcgacgtctgatgtggcaaaactctttgggtcattgtgtgctgaaggccaacttcccaaaaggaaagaaggagctgtctgtttctcttttccagactctagtgctgatgctcttcaacgatgcccagtctttgacttttcacgacattaaagatacttctgccattgaggacaaggagcttcgcagaacccttcaatcattggcgtgtggtaaaattcgtgttttgaacaagataccaaagggcagagaagtggaagatgaagacacatttgttttcaatgaggactttgttgctcctctcttccgaatcaaggtcaatgcaatacaattaaaggaaactgttgaggagaatacgactacaacagagcgagtctttcaggaccgccaatatcagatcgatgctgcaatcgtacggatcatgaaaacacgcaaggtgttaagtcacacattgttaataactgaactatttcagcagctgaaatttccaattaaaccagctgacttgaagaaaagaatcgagagcttgattgaccgggagtaccttgaaagggacaaagccaatcctcagatctacaactaccttgcttag

SEQ ID NO: 13662 - protein, 745 aa, Physcomitrella patens subsp. patens
MTVSSSPGIGTTANLSRKKATPPQPARKLVIKPFKEKPKLPKDFEEVTWAKLREAVTAIHLKQPVNCSLEELYRAVEDLCLHKMAGNLYRRLQQECESHISVKLRDLVGRSPDSVVFLSHVESCWQDHCDQMLLIRSIALYLDRTYVIPNSGVRSLWDMGLQLFRRHLSACPEVESKTVSGLLTLIEKERMGETVDRSLLKHLLRMFSALCIYSESFERRFLDCTADFYAAEGIRFMQQTDVPDYLKHVENRLHEENERCLLYLDGSTRKSLVATAEKQLLSRHTTAILEKGFSMLMDANRLADLQRMYMLFARVNTLESLKMALSTYIKATGNSTVMDEEKDKDMVSWLLDLKARLDAIWEESFFRNETFSNTLKDAFEHLINLRQNRPAELIAKFIDGKLRSGNKGTSEEELEGILDKVLVLFRFIQGKDVFEAFYKKDLAKRLLLGKSASIDAEKSMISKLKTECGSQFTNKLEGMFKDIELSREINESFRQSAQARLKLPSGIEMNVHVLTTGYWPTYPPMEVRLPRELNVYQDIFKEFYLSKHSGRRLMWQNSLGHCVLKANFPKGKKELSVSLFQTLVLMLFNDAQSLTFHDIKDTSAIEDKELRRTLQSLACGKIRVLNKIPKGREVEDEDTFVFNEDFVAPLFRIKVNAIQLKETVEENTTTTERVFQDRQYQIDAAIVRIMKTRKVLSHTLLITELFQQLKFPIKPADLKKRIESLIDREYLERDKANPQIYNYLA

SEQ ID NO: 13663 - DNA, 2232 bp, Physcomitrella patens subsp. patens
  CDS (1)..(2232)
atgaataacgagaggaaggtgatcgagttggagcagggatggagctttatgaagaaaggcatcaccaagctaaagaatattctggagggtgtgcccgaacaacagttcagctccgaggaatacatgttgctttacacaaccatatacaacatgtgtacgcagaagcctcctcaggattactctcagcaactctatgacagatacagggagtccttcgaagactacatcaaatccaaggtattgcctgccttaagagagaaacacgaagaattcatgctgaaggagcttgtgaagcgatgggataatcacaaaattatggttcgatggctgtctcggttttttaattacttagatcgatacttcatcgcaaggcgatcacttccagcccttagtgaagtcgggctcatgtgtttccgcgatctcgtgtacgcggagataaagattaatgttaaggatgctgtaattgcactgattgaccgtgagcgcgaaggcgaacaaatcgatcgggcgctcttgaagaatgtgctgggtatttttgttgagattggaatgggtaatatggatgcgtatgagtctgatttcgagacttttatgctccaagatacagcttcgtattattccagaaaggcagcgtcctggattgaagaggactcatgtcctgattatatgctcaaggctgaggaatgtttgaaaagggagaaggaaagggttgggcattacttacatgctagcagtgagcataaattgctggagagggtacagcatgaattattaactcaatatgagccacagttacttgagaaggagcattccggctgccacactctgctaagagacgacaaagttgaagatctttcaagaatgtatcggctattcttgagaattccgaagggtttggaacctgtggcagccatttttaaactgcatgtcacagaagagggaactgcccttgtgaagcaagctgaagatgctgctggtaacaaaaaggctgaaaagaaagatactgttggagttcaagaacaggcctttgtgcggaaggtcattgagttacatgacaagtatctgcagtatgtgagcgagtgcttcgtcaaccactccctttttcacaaagccctgaaggaagcttttgaagtcttctgcaacaagggtgttgcagggagtacaagtgcagagttactggccacattttgtgataatttattgaaaaagggtggaagtgaaaagttaagtgacgaagcaattgaagacacacttgaaaaggtggtgaagcttcttgcatacatcagcgataaagatctgtttgcagagttttacaggaaaaagctggctcgaaggttgctctttgacaagagtgctaatgacgaccatgagcgtagcatcttaacaaaattgaagcagcaatgtggggggcagttcacttccaaaatggagggcatggtgacggatctgactcttgcacgtgaaaatcaaaccaattttgaagaatatttgacggagaacatacagtcgagcccaggcattgacttgacagtgacagttctaacaactggcttttggcccagttacaagtcttccgatctggctttaccagcagagatggtgaaatgcgttgaagtattcaaggagttctatcagacgaaaacaaagcataggaagctgacttggatatactctttaggaacgtgcaacataactgggaaatttgatgctaagccaattgagctaattgttaccacataccaggctgcagtgcttctgctctttaatgctgaggataggctgagctacaacgacatcaagaatcaattgaaccttacagacgaggatatcgttagattgttgcactcattatcatgtgccaagtacaagattctaaacaaagatccacacaccaagactgttgggcaaactgatacctttgaatttaataccaagttcactgacaagatgagacggattaagattccattgccgccgatggatgaaaagaagaaggtgattgaggatgtggataaggacaggcgatacgccattgacgcatctattgtccggatcatgaagagtcggaaagtattgcctcatcagcaactggtcttggaatgtgttgagcaacttgggcggatgttcaagcctgattttaaagtgattaagaagcgagttgaggatcttattgcccgtgaatatttagagcgagataaggacaaccccaacatgttcaagtatgtggcatag

SEQ ID NO: 13664 - protein, 743 aa, Physcomitrella patens subsp. patens
MNNERKVIELEQGWSFMKKGITKLKNILEGVPEQQFSSEEYMLLYTTIYNMCTQKPPQDYSQQLYDRYRESFEDYIKSKVLPALREKHEEFMLKELVKRWDNHKIMVRWLSRFFNYLDRYFIARRSLPALSEVGLMCFRDLVYAEIKINVKDAVIALIDREREGEQIDRALLKNVLGIFVEIGMGNMDAYESDFETFMLQDTASYYSRKAASWIEEDSCPDYMLKAEECLKREKERVGHYLHASSEHKLLERVQHELLTQYEPQLLEKEHSGCHTLLRDDKVEDLSRMYRLFLRIPKGLEPVAAIFKLHVTEEGTALVKQAEDAAGNKKAEKKDTVGVQEQAFVRKVIELHDKYLQYVSECFVNHSLFHKALKEAFEVFCNKGVAGSTSAELLATFCDNLLKKGGSEKLSDEAIEDTLEKVVKLLAYISDKDLFAEFYRKKLARRLLFDKSANDDHERSILTKLKQQCGGQFTSKMEGMVTDLTLARENQTNFEEYLTENIQSSPGIDLTVTVLTTGFWPSYKSSDLALPAEMVKCVEVFKEFYQTKTKHRKLTWIYSLGTCNITGKFDAKPIELIVTTYQAAVLLLFNAEDRLSYNDIKNQLNLTDEDIVRLLHSLSCAKYKILNKDPHTKTVGQTDTFEFNTKFTDKMRRIKIPLPPMDEKKKVIEDVDKDRRYAIDASIVRIMKSRKVLPHQQLVLECVEQLGRMFKPDFKVIKKRVEDLIAREYLERDKDNPNMFKYVA

SEQ ID NO: 13665 - DNA, 2238 bp, Physcomitrella patens subsp. patens
  CDS (1)..(2238)
atgacgatgaacaacgagcggaaggtaattgagttggagcaaggatggagcttcatgcagatagggattacgaagctaaagaacctgttggagggcgtacccgagcagcagttcagctccgaggaatacatgttactttatacaacaatttacaatatgtgtacgcagaagcctccacaggattattctcagcaactatatgacggatatagagtgtccttcgaggagtacatcaattcaaaggtgttgcccgcacttagagaaaaacacgaggagttcatgctcaaggagcttgtgaagagatggtataatcacaaaattatggttagatggctgtcccggttttttaattacctagatcggtacttcatcgccaggcggtctcttcctgcattgagcgaagtcggtctcatttgtttccgtaacctggtttatgcagagacgaagatcaatgtgaaagatgcggtcgtagctctgattgatcgtgagcgtgaaggcgagcagatagatcgggcacttctgaagaatgttcttggtatctttgttgaaattggaatgggcaacatggatgcatacgacacagactttgagcaattcatgctcgaagatactgctgcttactacaggaggaaggcctcgtcttggattcaagaagattcatgtcctgactacatgctcaaggccgaggaatgcttgaaaagggagaaggaaagggttgggcattacttgcatgctagtagtgagcaaaaattgctggagaaagttcagcaagaactccttacgcaatacgaaacacaattacttgagaaagagcattcaggctgtcatactctgttgagggatgataaggttgatgatctgtcaagaatgtatcggttattctacagaattccgaagggtttggaacctgtggcatccatttttaaacagcatgtcacagaggaaggaaccgcccttgtcaaacaagctgaagatgcagtcagtaataagagggctgagaagaaagatacagttggagtacaagagcaggtctttgtgcgaaaggtgattgaattgcatgacaagtatctgcagtatgtcagcgagtgttttgcgaatcattctctttttcacaaggcattgaaagaagcctttgaagttttctgtaataagggtgttgcagggagtacaagtgcagagctcctggccacgttttgtgataatttattgaaaaagggtggaagcgaaaagctaagtgatgaagcaattgaggacacacttgaaaaggtagtgaagcttcttgcgtatatcagtgacaaggacctgttcgcagagttttacaggaaaaagctagctcgaaggttgcttttcgacaaaagcgctaacgacgatcatgagcgtagcatcttgaccaagttgaaacagcagtgtggaggacagttcacttctaagatggagggcatggtgacagatctgacccttgcacgcgagaatcaatcgaactttgaggactatttgtcggataataccaagtccaatccaggcatcgatttgacagtgacagtacttacaactggattttggcccagttataagtcttcagatctggccttaccggcagagatggttaaatgtgttgaagtattcaaggagttttaccaaacgaaaacgaagcatcggaaattgacttggatttactccctgggaacatgtaacataactggaaagtttgatgccaagcctattgagcttattgtaacaacatatcaggccgcagtgctattgctttttaatgccgaggataggctgagctacaatgatatcaagaaccagctgaatcttactgatgaggatatagttagactgttgcactcattgtcatgtgcgaagtacaagattcttaacaaagaccccaatactaaggccgtcggacaaaatgacatctttgagtttaatactaagttcacggacaagatgagacggataaagattcctctgccgccaatggatgagaagaagaaggtgatagaggatgtggacaaggacaggcgatacgcaatcgatgcatctattgtccggatcatgaaaagccgtaaaatgcttcctcatcagcaactggtactggaatgtgttgagcagctcgggcggatgttcaagcctgatttcaaggtgatcaagaagcgagttgaggaccttatcgctcgtgattatttagagcgagacaaagacaaccctaatatgttcaaatatgtcgcgtaa

SEQ ID NO: 13666 - protein, 745 aa, Physcomitrella patens subsp. patens
MTMNNERKVIELEQGWSFMQIGITKLKNLLEGVPEQQFSSEEYMLLYTTIYNMCTQKPPQDYSQQLYDGYRVSFEEYINSKVLPALREKHEEFMLKELVKRWYNHKIMVRWLSRFFNYLDRYFIARRSLPALSEVGLICFRNLVYAETKINVKDAVVALIDREREGEQIDRALLKNVLGIFVEIGMGNMDAYDTDFEQFMLEDTAAYYRRKASSWIQEDSCPDYMLKAEECLKREKERVGHYLHASSEQKLLEKVQQELLTQYETQLLEKEHSGCHTLLRDDKVDDLSRMYRLFYRIPKGLEPVASIFKQHVTEEGTALVKQAEDAVSNKRAEKKDTVGVQEQVFVRKVIELHDKYLQYVSECFANHSLFHKALKEAFEVFCNKGVAGSTSAELLATFCDNLLKKGGSEKLSDEAIEDTLEKVVKLLAYISDKDLFAEFYRKKLARRLLFDKSANDDHERSILTKLKQQCGGQFTSKMEGMVTDLTLARENQSNFEDYLSDNTKSNPGIDLTVTVLTTGFWPSYKSSDLALPAEMVKCVEVFKEFYQTKTKHRKLTWIYSLGTCNITGKFDAKPIELIVTTYQAAVLLLFNAEDRLSYNDIKNQLNLTDEDIVRLLHSLSCAKYKILNKDPNTKAVGQNDIFEFNTKFTDKMRRIKIPLPPMDEKKKVIEDVDKDRRYAIDASIVRIMKSRKMLPHQQLVLECVEQLGRMFKPDFKVIKKRVEDLIARDYLERDKDNPNMFKYVA

SEQ ID NO: 13667 - DNA, 2232 bp, Physcomitrella patens subsp. patens
  CDS (1)..(2232)
atgattaacgagcggagggtgattgagttggagcaaggatggaatttcatgcagaaggggattacgaagctaaagaatctgctggagggtgtgcccgagcagcagttcagctccgaggaatatatgttgctctatacaacaatttacaatatgtgcacgcagaagcctccgcaggattactctcagcaactctatgataggtatagagagtcctttgagggatacattaattccaaggtgctacctgctctcagagaaaaacatgaggagttcatgcttaaggagcttgtgaaaagatgggataatcataaaataatggttcgatggttatcccggttcttcaattacctagatcggtactttatcgctaggcggtcacttcctgcattgagcgaagtcggtctgatgcgttttcgcgatctggtctacgaagagatgaaggtcaatgtgaaagatgcagtaattgctcttattgaccgggagcgcgaaggcgagcaaatagatcgggcacttcttaagaatgtccttggtatcttcgttgaaattggaatgggtaacatggatgcttacgagactgactttgaggcatttatgcttgaagatacagcttcgtattacaagagaaaggcctcgtcttggattcaagaggattcatgtcctgattacatgcttaaggccgaggaatgcttgaagagggagagagaaagggttgggcactacttgcatgctagcagtgagcaaaaactgcttgagaaagttcaacatgaactcctgactcaatatgagacacagttacttgagaaagagcattcaggctgtcatactctgttgagagatgacaaggtcgatgatctatcaagaatgtatcggttattctgcagaatccttaagggtttggatcccgtggcagctatttttagagagcatgttacaggcgaaggcacggccttggtaaaacaggcagaagatgcagccagtaacaaaaaggctgagagaaaagatatcgttggagtgcaagagcaggcctttgtgcggaaggtgattgaactacatgacaaatatctgcagtatgtcagcgactgctttttaaatcattctctttttcacaaggcattgaaagaagcttttgaagtcttctgcaataagggtgttgctgggagtacaagtgcagaactcctggccacattttgtgataatttattgaaaaagggaggaagcgaaaagttaagtgatgaggcgatcgaggatacacttgaaaaggtggtgaagctccttgcatacatcagtgataaggacttatttgcagagttctacaggaaaaagctggctcgaaggctgctctttgacaaaagtgccaatgacgatcatgagcgcagtatcttgaccaagttgaaacagcagtgtggaggacaattcacctctaagatggaggggatggtaacagatctgacacttgcacgcgaaaaccaaataaactttgaggagtatttgtcggataacacccagtcaaatccaggcatcgatctgacagtaacagttcttacaactggcttttggcccagttacaagtcttcagatctggctttaccagcagagatggtaaaatgtgtggaagtgtttaaggagttctatcaaacgaaaacaaagcatcggaagctgacttggatatattccttgggaacttgtaacataacaggaaagtttgacgctaagcctattgagcttattgtcacaacatatcaggctgcagtgctgttgcttttcaatgctgcggataggctgagctataatgatattaagagtcagcttaaccttacagacgaggatattgttagattgttacactcattgtcatgtgcgaagtacaagattcttaataaagacccaatcaccaaaactgttggacaaagtgatatctttgagtttaataccaagttcactgacaagatgaggcggattaagattcctctgccgccaatggatgaaaagaagaaggtgatcgaggacgtggacaaggacaggcgatatgctattgatgcttctatcgtccggatcatgaaaagtcgtaaaatgttgcctcatcagcaactggtattggaatgtgttgaacagcttgggcggatgttcaagcccgacttcaaggtgatcaagaagcgagttgaggaccttattgctcgtgaatatttagagcgagacaaggacaatcccaacgtgttcaaatatgtggcgtaa

SEQ ID NO: 13668 - protein, 743 aa, Physcomitrella patens subsp. patens
MINERRVIELEQGWNFMQKGITKLKNLLEGVPEQQFSSEEYMLLYTTIYNMCTQKPPQDYSQQLYDRYRESFEGYINSKVLPALREKHEEFMLKELVKRWDNHKIMVRWLSRFFNYLDRYFIARRSLPALSEVGLMRFRDLVYEEMKVNVKDAVIALIDREREGEQIDRALLKNVLGIFVEIGMGNMDAYETDFEAFMLEDTASYYKRKASSWIQEDSCPDYMLKAEECLKRERERVGHYLHASSEQKLLEKVQHELLTQYETQLLEKEHSGCHTLLRDDKVDDLSRMYRLFCRILKGLDPVAAIFREHVTGEGTALVKQAEDAASNKKAERKDIVGVQEQAFVRKVIELHDKYLQYVSDCFLNHSLFHKALKEAFEVFCNKGVAGSTSAELLATFCDNLLKKGGSEKLSDEAIEDTLEKVVKLLAYISDKDLFAEFYRKKLARRLLFDKSANDDHERSILTKLKQQCGGQFTSKMEGMVTDLTLARENQINFEEYLSDNTQSNPGIDLTVTVLTTGFWPSYKSSDLALPAEMVKCVEVFKEFYQTKTKHRKLTWIYSLGTCNITGKFDAKPIELIVTTYQAAVLLLFNAADRLSYNDIKSQLNLTDEDIVRLLHSLSCAKYKILNKDPITKTVGQSDIFEFNTKFTDKMRRIKIPLPPMDEKKKVIEDVDKDRRYAIDASIVRIMKSRKMLPHQQLVLECVEQLGRMFKPDFKVIKKRVEDLIAREYLERDKDNPNVFKYVA

SEQ ID NO: 13669 - DNA, 2307 bp, Physcomitrella patens subsp. patens
  CDS (1)..(2307)
atgtacgtggatggtgtggaagatcatctcgcatccactgtatcatatcctgctgggtcggtgtcggcagtgacgttaagtaataatccgggagttgggactacggcaaacttatcgcggaaaaaagccacaccaccgccgcctgccaagaagttggtaatcaagcccttcaaagacaaaccaaaattgcctgctaactttgaggaagtgacatgggtcaagatcaaggaagctgtaactgcaattcacctaaagcaaccagtgaattgcagtttggaggagctatatcgagctgtggaagatctctgtgttcacaagatggcaggaaatttgtacaagagattgcagctggagtgcgaaagtcacatttcaatcaagctgcgtgatcttgcagggcgcagtcctgatgctgtggtgttcctgtctcatgttgaaagatgctggcaagaccattgcaaccaaatgcttgttatccgcagcattgcgctctatttagaccggacttatgttattcaaaattcaggtgttcgatctctatgggacatgggtttgctgctttttcgccgccacctgtcagcatgcccagaagttcagtctaaaacagtttctggtcttctcagacttatcgaggaggagaggatgggagagtctgtggatcggagtttattgaagcacttgctgcgcatgtttagtgctcttggcatatacgctgagagttttgagagacaatttctagattgtacctctgatttttacgcagcggagggaacacgctttatgcagcaaacagatgtgcccgattatcttaaacatgtcgagactcgtctccatgaagagaacgagcgatgcttgctttatttggatggaagtacacggaaacctttggtggctactgccgagaaacagcttctcagccgccatacagctgcaattctggagaagggatttggcatgctcatggatgccaaccgcgtggcagatcttcaacggatgtacatgctttttacacgagtaaatgctttggagtctctgaagatggccttgagtacttacatcaagacaacgggcaacagtactgtgatggatgaagaaaaggataaggacatggtgtcttggcttttagatctgaaggcccgtctggatgctatttgggatgagagcttttctagaaatgaaacctttgctaatactttgaaggatgcattcgaacatctcattaatctgcgtcagaaccgacctgccgagctcatagcgaaattcattgatggaaagctgcgtgctggcaacaagggaacgtccgaagaggagctagagggcatcctggataaagttttggtgctttttagattcattcagggtaaagatgtattcgaagctttttacaagaaggatttggccaaacgtttgcttctggggaagagtgcctctattgatgcagagaaatccatgatatcaaagctcaagacagaatgcggcagtcaattcacgaataagctggaaggaatgttcaaggatattgagctttcacgggaaatcaatgaatcgtttaggcagtctgctcaggcacggatgaagctgccttcagggattgagatgaatgttcatgttctgacaactggctattggcctacttatccacccatggaggtcaggttaccacacgagctgaatgtataccaggacattttcaaggagttttatctgagtaagcatagtggacggcgtctgatgtggcaaaactccttgggtcattgcgtgctgaaggccaattttcctaaaggaaagaaggaactttccgtttctctttttcagaccgtggtgctgatgctcttcaacgacgcgcaatctcaaagcttccaggaaatcaaggacacaactgcgattgaggataaagaacttcgaagaactcttcaatcattggcttgtggtaaagttcgagttcttaacaagcaaccaaagggcagagaagtggaagatgatgacatatttgtcttcaacgaggattttgttgctcctctttttcgtattaaggtcaatgctatacagttgaaggaaactgtagaggaaaatacgagtacaacagagcgagtgtttcaggatcgtcaatatcagattgacgctgccattgtccggatcatgaaaacacgaaaagtgttaagtcatacattgttaataacagaactatttcagcagctgaaatttccaattaaaccagctgatctgaagaagagaattgagagcctgatcgatcgggagtatctggaaagggacaaagccaaccctcaaatatacaactatctggcttag

SEQ ID NO: 13670 - protein, 768 aa, Physcomitrella patens subsp. patens
MYVDGVEDHLASTVSYPAGSVSAVTLSNNPGVGTTANLSRKKATPPPPAKKLVIKPFKDKPKLPANFEEVTWVKIKEAVTAIHLKQPVNCSLEELYRAVEDLCVHKMAGNLYKRLQLECESHISIKLRDLAGRSPDAVVFLSHVERCWQDHCNQMLVIRSIALYLDRTYVIQNSGVRSLWDMGLLLFRRHLSACPEVQSKTVSGLLRLIEEERMGESVDRSLLKHLLRMFSALGIYAESFERQFLDCTSDFYAAEGTRFMQQTDVPDYLKHVETRLHEENERCLLYLDGSTRKPLVATAEKQLLSRHTAAILEKGFGMLMDANRVADLQRMYMLFTRVNALESLKMALSTYIKTTGNSTVMDEEKDKDMVSWLLDLKARLDAIWDESFSRNETFANTLKDAFEHLINLRQNRPAELIAKFIDGKLRAGNKGTSEEELEGILDKVLVLFRFIQGKDVFEAFYKKDLAKRLLLGKSASIDAEKSMISKLKTECGSQFTNKLEGMFKDIELSREINESFRQSAQARMKLPSGIEMNVHVLTTGYWPTYPPMEVRLPHELNVYQDIFKEFYLSKHSGRRLMWQNSLGHCVLKANFPKGKKELSVSLFQTVVLMLFNDAQSQSFQEIKDTTAIEDKELRRTLQSLACGKVRVLNKQPKGREVEDDDIFVFNEDFVAPLFRIKVNAIQLKETVEENTSTTERVFQDRQYQIDAAIVRIMKTRKVLSHTLLITELFQQLKFPIKPADLKKRIESLIDREYLERDKANPQIYNYLA

SEQ ID NO: 13671 - DNA, 2205 bp, Physcomitrella patens subsp. patens
  CDS (1)..(2205)
atgaatccggctaagaagaaaaacttcaagatagagcccttcaagcataaggtggagatggaccctaaatatgcagaaaagacctggaagatactggaggatgctattcatgagatctataatcacaatgctagcggcctcagctttgaagagctgtacaggaacgcgtacaacatggtgcttcacaaatacggagagaaactctattcaggagttgttcaaacaatgacgcagcatttgcgggagatagcaaaaataatcgagggagcacaagggggtttgtttttggaagagttggatgtgaaatggcgtgagcacaataaatcgcttcagatgatccgggatatattgatgtacatggacaggacatttgtgaacaattttaacaagactcctgtacatgagctcggtctgaatttgtggcgtgatcacattgtgaggtcaccacagatacgggatcggctgttgaacacgcttttagaccttgtgcgcagagagcggacaggggaagtcatcaatcggggactcatgcggaacattacgaagatgcttgtcgagctaggaaccaatgtgtatcaagaagatttcgaaaggccatttttggatgcagcatctgacttttacaggctggagtctcagcagctcattgagaccagtgactgccctgattatctgcggaaagccgagaagcggctgaatgaggaaattgaaagagtggcgcattaccttgattccaaaagtgagccaaagataacacaagtggtggagagagaggtcattgggaaccgtatgaggctcttggtggaaatggagaattcgggtctgatttctatgctgatcgacgataagtatgatgatcttggtaggatgtacaatctgttccgtcgaatttccacgggtttgcaaaccatgagggaactcatgacagctcacctacgtgagacgggaagacagctcgttatggatcccgaaaggttgaaggatccagtagagtttgttcaacgcctacttgatgagaaagacaagtacgacagaattattcagcagtctttccacaacgacaagatgttccagaatgctctcaattcctctttcgaatatttcatcaacttgaacattcgatctccagagttcatttccttgtttgtagatgataaactgaggaagggactgaaaggtgcaagcgaagaggacgtggagttggttttggacaaggttatgatgttgttccggtatctgcaagagaaagatgtctttgaaaagtactacaagcagcacttggcaaagaggctgttgtctggcaggacggtatctgatgatgcagagcgcagtcttattgtgaagttgaagactgaatgtggatatcagttcacgtcgaaattggaggggatgttcacagacatgaagacatctagggataccatgcagggatttaatgcaacaggggctggtgcagaagggaatgaggggccgactcttactgtgcaagtgctgaccacgggttcatggccaactcagtcaggtgcccggtgtaacatgccaacggagattcttgcaatgtgcgataaatttaagatgtactatttgtcaactcacacaggtcggcgtttgacatggcaaacaaatatgggtactgcggatttgaaagccacattcggggacggaaataaacatgagctgaatgtatctacgtatcaaatgtgcattctgtgtcttttcaatcaagctgaccgtctgtcgtatcgggagatcgagcaagcgactgatataccagcaccggacctgaaaagaagtctgcaatcgctggcatgcgtgaagggaaagaatgtgttgaggaaggaaccaatgagcaaagacattagcgaggacgacacttttgtatttaatgacaagttctccagcaagttttacaaagtaaagatcagtactgttgtggctcagaaggagagtgaacctgagaagcaggagacacgacaaaaagttgaggaagacaggaagcctcaaattgaagccgctattgtgagaatcatgaaatcaagacgtcttctggaccacaataacattattagcgaagtgaccaagcagctccaagcccggtttatgcctaatcctgctgtgatcaagaagcggattgaatccttgattgagagggaattcttggaaagagatcgtatggaccgaaaactgtaccgttatcttgcatga

SEQ ID NO: 13672 - protein, 734 aa, Physcomitrella patens subsp. patens
MNPAKKKNFKIEPFKHKVEMDPKYAEKTWKILEDAIHEIYNHNASGLSFEELYRNAYNMVLHKYGEKLYSGVVQTMTQHLREIAKIIEGAQGGLFLEELDVKWREHNKSLQMIRDILMYMDRTFVNNFNKTPVHELGLNLWRDHIVRSPQIRDRLLNTLLDLVRRERTGEVINRGLMRNITKMLVELGTNVYQEDFERPFLDAASDFYRLESQQLIETSDCPDYLRKAEKRLNEEIERVAHYLDSKSEPKITQVVEREVIGNRMRLLVEMENSGLISMLIDDKYDDLGRMYNLFRRISTGLQTMRELMTAHLRETGRQLVMDPERLKDPVEFVQRLLDEKDKYDRIIQQSFHNDKMFQNALNSSFEYFINLNIRSPEFISLFVDDKLRKGLKGASEEDVELVLDKVMMLFRYLQEKDVFEKYYKQHLAKRLLSGRTVSDDAERSLIVKLKTECGYQFTSKLEGMFTDMKTSRDTMQGFNATGAGAEGNEGPTLTVQVLTTGSWPTQSGARCNMPTEILAMCDKFKMYYLSTHTGRRLTWQTNMGTADLKATFGDGNKHELNVSTYQMCILCLFNQADRLSYREIEQATDIPAPDLKRSLQSLACVKGKNVLRKEPMSKDISEDDTFVFNDKFSSKFYKVKISTVVAQKESEPEKQETRQKVEEDRKPQIEAAIVRIMKSRRLLDHNNIISEVTKQLQARFMPNPAVIKKRIESLIEREFLERDRMDRKLYRYLA

SEQ ID NO: 13673 - DNA, 2328 bp, Phaeosphaeria nodorum SN15
  CDS (1)..(2328)
atggcctctgcatccgcgaccacgtctacgatgccaccggtccctgcaaaggacgatgtgaatgccacatggaaatacctcgaagccggtgtcgataagatcatgaccaacctccgcgggggcatggacatgaagacatacatgggcctctacaccgcgatccacaacttctgtaccgcgcagaaggctgtcgccggctcgtcatttcacgccgctaacaaccgcggtggcgcacatcttctcggtgaagacctctaccaacatctcatcgaatatctcaagacacatcttcaaggcgtccaggacgagtcgcggcaacatgtcgacgaggcgctcctcacattctacatcaaggagtggaatcggtacacgaccgccggacagtacaacaaccatttgtttcggtacctcaaccgtcattgggtgaagcgcgagatggacgagggaaagaagaacatctacgatatctacaccttgcacttggtccgctggaaggaggacatgttcaccggcacccaggagagcgtcatgcgcagcgtcctgaagcttgtcgagaagcagcgaaacggcgagaccattgagcagtcacagatcaagtcggtcgtcgactcgttcgtatctctgggcctggacgagtcggacagctccaagtctactctcgacgtttataaggagttcttcgagaagccgttcctcgcagccaccgctgaatactacgacaacgaatcgaagcaatttttggccgagaacagcgtggtcgagtacatgaagaaggctgagtcccgcctagacgaggagaaagagcgcgtgccgctgtacctgctcaacgagatcatgtctcctttgatgcggacatgtgagcagtcgctcattaccaaccactcacaagctcttagggaagaattccagattcttctcgaccacgacaagatcgacgaccttggccgcatgtacaagttgcttgcccgcattcccgagggcctggatcctcttcgtggccgtttcgagacccacgtccgtaaggctggcttggctgccgtcgacaagattgcccaagagggcgacagcttagaacccaaggtctacgtcgaggcgctcctcgaagtccacacacaataccaagacctcgtgaacaaggcgttcaacggcgagtcagagtttgtgcgttccttggacaacgcctgccgcgaattcgtcaaccgcaacaagatatgtaaatcgggttccaacaagtctccagaactgctcgcaaagtacaccgatactctgctgaagcgatcgagcgcaaagatgagcgaagaggacgatatggagaagctgcttacacagatcatgacagtcttcaagtacattgaggacaaggacgtttttcagaagttctactcgcgcatgttggcgaagcgtctggtacagactacctcggcttccgatgatgctgagaccagcatgatatccaagctcaaggaggcctgtggtttcgagtacaccaacaagcttcagcgcatgttccaagatatccagatttccaaggacttgaactctgcctttaaggagtggcagtcgaacaacttggacgaggctgacatgaagaccaacgtcgatgcgagctaccacatccttggaaccggtttctggccgctcaacccacccaccactccattcacgcccccacaacttatcgtccagacttatgaccgtttcgcccgtttctacaaccacaagcaccagggtcgcaagctcacatggctctggcagttgtgcaagggtgaagtcaaggcaaactactgcaaggttcttaactccaaggcatcgcctaccttccaggtctcgacttatcagatgggcattatgctactattcaacgatagtgatactgtcacttacgacgagatcgcggaggccacgaagctgaacaaggagacactcgaccctagcttaggcgtcttcctaaaggcaaaggttctgatcgcgcagcctgagaacgccaagacggagtcgggcaccacctacaagctcaacaccgctttcaagaccaagaaggcgaagatcaacctcaacatcggtatcaagtcggagcagaaggctgaggctgaagacacgcacaagaccattgaggaggaccgcaagctactcatgcagtccgccattgtgcgtatcatgaagtctcgcaagaagatgaagcaccaacagctcgtctccgagacgattcagcagatcaagaaccgcttcatgccccgcgtgcccgacatcaagaagtgcatagacatcctgcttgagaaggagtacctggagcgtcttgagggtgacgagctcggctatctcgcctaa

SEQ ID NO: 13674 - protein, 775 aa, Phaeosphaeria nodorum SN15
MASASATTSTMPPVPAKDDVNATWKYLEAGVDKIMTNLRGGMDMKTYMGLYTAIHNFCTAQKAVAGSSFHAANNRGGAHLLGEDLYQHLIEYLKTHLQGVQDESRQHVDEALLTFYIKEWNRYTTAGQYNNHLFRYLNRHWVKREMDEGKKNIYDIYTLHLVRWKEDMFTGTQESVMRSVLKLVEKQRNGETIEQSQIKSVVDSFVSLGLDESDSSKSTLDVYKEFFEKPFLAATAEYYDNESKQFLAENSVVEYMKKAESRLDEEKERVPLYLLNEIMSPLMRTCEQSLITNHSQALREEFQILLDHDKIDDLGRMYKLLARIPEGLDPLRGRFETHVRKAGLAAVDKIAQEGDSLEPKVYVEALLEVHTQYQDLVNKAFNGESEFVRSLDNACREFVNRNKICKSGSNKSPELLAKYTDTLLKRSSAKMSEEDDMEKLLTQIMTVFKYIEDKDVFQKFYSRMLAKRLVQTTSASDDAETSMISKLKEACGFEYTNKLQRMFQDIQISKDLNSAFKEWQSNNLDEADMKTNVDASYHILGTGFWPLNPPTTPFTPPQLIVQTYDRFARFYNHKHQGRKLTWLWQLCKGEVKANYCKVLNSKASPTFQVSTYQMGIMLLFNDSDTVTYDEIAEATKLNKETLDPSLGVFLKAKVLIAQPENAKTESGTTYKLNTAFKTKKAKINLNIGIKSEQKAEAEDTHKTIEEDRKLLMQSAIVRIMKSRKKMKHQQLVSETIQQIKNRFMPRVPDIKKCIDILLEKEYLERLEGDELGYLA

SEQ ID NO: 13675 - DNA, 2370 bp, Tribolium castaneum
  CDS (1)..(2370)
atgtcaaggcacgttagtaacgttgaggaccgaagtcctgtgaagaggttggaagagccccaaagatcgccgaaaaagctgcgtttggagatcgaaattgatgaaaacatgagtgacaattcgcctgaacgaaaccgacgagcgaatttttcaaacgtgaacggcgtcaaccgcaatttaaacatccactctgtcaagccaaccaccaaaaagcttatcataaagaatttcaaaagtgaaccgaagctcccggacgactaccatgagaccacctgggagaagctaaagagtgcggtcattgcaatacaacaatcaaaacccaacgaataccttctggaggagctctaccaggcggttgggaacatgtgcagccacaaaatgtcccacattctgtacaacgggctctcgcacctgatcgaggcgcacgtgtgcagcaacatcgaacggttcatcacagagcccatggaccgtttcctgtttttgaaaaaaatgaacgacacttggcaatctcactgtaatcaaatgatcatgatcaggggcatcttcctgtaccttgaccgcacgtacgtgctccagaaccccaacatttcctcgatctgggacatgggcttagatttatttcgcaagtacttcatgttgcacactttagtccaaacgcgcgtagtcgaaggtttgttaatgttgatcgaaaaggagcgacaaggcgataaagtcgaccggactttactcaagtccctgctacgcatgctaaccgacctgcagatttacaacaaagcttttgaacaaaaattcctgcaagcgactgagcgcttgtacgcgaccgaaggacaaaggcttatgcaagaactcgaagtgcctgaatttttggctcatgtagataaaagaattcacgaagaaaacgaaagggtcattcattatttagactgtagtacaaaatatcaattaattcacacggtcgagaaacagctgcttagtgaacacattaataatattctccaaaaagggctcgacaacctccttgaggagaaccgtctgcatgacttgtcgctcctctaccagcttttcagtcgcgtcaaaaacggccttcatgagctatgtctcgcgtttaacgcgtttattaagaaaaaggggcgcactattgtcattgaccccgaaaaagataaaacaatggtgcaagaattgctagatttcaaggacgccatggataacatcgtcgcttgttgcttcaagaaaaacgaaatgttcagcaactcgctcaaggaggcgttcgaacatttcatcaaccaacgcaccaacaagccagccgaactcattgcaaaattcgtggactcgaagctgcgcgctggcaacaaggaggcaaccgaggaggagctggagcgccttctggacaaaataatggtcctgttccggtttatccacggtaaagacgtgttcgaggccttctataaaaaagacttggcgaagcgattgctcgtgggcaaatcggcgagtgtggacgccgagaagagcatgttgagtaaattaaagcaggaatgtggtggcggtttcacgtcgaagttagaaggaatgttcaaagacatggagttgagtaaagacatcaacgtggcgtttaagcaacacttgaatattagcacgcttgatttgatacctctagacatgacagttaatattttgacaatggggtattggcccacttataccccaatggacgtgaccctgccgccgcaaatggtcaagttccaagacatcttcaaagagttttacttaagtaagcacaacgggaggaaactgcagtggcagccgactttggggcattgcgtcctcaaggcgaggtttaaagcggggcagaaggagttagtcgtttcgctttttcaaactctggtgatactcctctttaacgagtctgatgagcacagttttgagtacattaaggcagctactaatatcgaagatggggagttgaggaggactttacagagtctggcttgtgggaaggctagagtcttgaataaaattccgaaaggaagggaaattgaggataacgacaagtttaaatttaataatgactttgtaaataaacttttccgtatcaagattaaccaaatacaaatgaaggagaccaccgaggaacagaaagcaactgaggaacgggtcttccaagaccggcaatatcaaattgatgcggcaatcgtgagaatcatgaaaatgagaaagactttaagccacaatttgctcattagtgaactcttagcacagctaaagtttcctgttaagccttctgatttgaagaaacgcattgagtctctcattgatagagactacatggaacgtgataaagataattccaaccaatacaactatgtggcttaa

SEQ ID NO: 13676 - protein, 789 aa, Tribolium castaneum
MSRHVSNVEDRSPVKRLEEPQRSPKKLRLEIEIDENMSDNSPERNRRANFSNVNGVNRNLNIHSVKPTTKKLIIKNFKSEPKLPDDYHETTWEKLKSAVIAIQQSKPNEYLLEELYQAVGNMCSHKMSHILYNGLSHLIEAHVCSNIERFITEPMDRFLFLKKMNDTWQSHCNQMIMIRGIFLYLDRTYVLQNPNISSIWDMGLDLFRKYFMLHTLVQTRVVEGLLMLIEKERQGDKVDRTLLKSLLRMLTDLQIYNKAFEQKFLQATERLYATEGQRLMQELEVPEFLAHVDKRIHEENERVIHYLDCSTKYQLIHTVEKQLLSEHINNILQKGLDNLLEENRLHDLSLLYQLFSRVKNGLHELCLAFNAFIKKKGRTIVIDPEKDKTMVQELLDFKDAMDNIVACCFKKNEMFSNSLKEAFEHFINQRTNKPAELIAKFVDSKLRAGNKEATEEELERLLDKIMVLFRFIHGKDVFEAFYKKDLAKRLLVGKSASVDAEKSMLSKLKQECGGGFTSKLEGMFKDMELSKDINVAFKQHLNISTLDLIPLDMTVNILTMGYWPTYTPMDVTLPPQMVKFQDIFKEFYLSKHNGRKLQWQPTLGHCVLKARFKAGQKELVVSLFQTLVILLFNESDEHSFEYIKAATNIEDGELRRTLQSLACGKARVLNKIPKGREIEDNDKFKFNNDFVNKLFRIKINQIQMKETTEEQKATEERVFQDRQYQIDAAIVRIMKMRKTLSHNLLISELLAQLKFPVKPSDLKKRIESLIDRDYMERDKDNSNQYNYVA

SEQ ID NO: 13677 - DNA, 2256 bp, Aspergillus oryzae RIB40
  CDS (1)..(2256)
atggctggcaccacactgattgaagcgatatgcgatgatgcatatgctgattcatacttcgagaagatatggggccagcttgacgccgcgctgaccgcgatcttcgatggcgggaaaccggagatctcgctagaagagttgtacaaaggtgctgagaatgtatgtcgtcaagggcgagcttcagcgttggccagacagctacaggagcgatgccgaggacatgtatccggtaaactgcgtgatactctggtagtaaaagcagcaggtgggaacaacatcgatacgctacgagctgttgtggattcgtggacaacatggcaatcaaagctggttacagtacgctggattttctattacctcgatcagtcgttcctcctccactccaaggaatacccagttatacgcgagatgggcttgatccagttccggcaacatatattcaatgacacagtcttacagccacaagtgctacagggcgcctgcgacctggtcgaagcggaccgtgatgaagggcgcagcatatcggccgactcatctttgcttcggaacgctattgaatttttccacggccttgatgtttatactactggctttgaacccctccttgtctctgagtcgaagaagttctttgcatcatgggctcagcatgaagcctcaggatatcttgccactttcgcggaaaacagtcaccgcttgattgaacaagaagtagacaggtgtacattgttctctttaaatcggagcacaaaacagaagttgtctgaactattggatcaggagttagtggcagaacaagagaatgttctcctcaaccaaaatgatattcttggtctgctgcgggccggcaataagactgccttagaaaagctgtatacgcttcttcaacgaagggatttgggggcgaaattgaaaacggcattcagcagttacatcgttgaggaggggaccagtatcgtctttgacgatgataaagaggcggagatggttgtccggctgctggatttcaaacagcagcttgacgagacttggaacaactccttccatcgacatgaggagctagggcacgccttgcgcgaggcatttgagacgttcatgaacaagggacgaaagtcgggcgcatccggaggcaccgataaccccaaaaccggtgagatgattgccaaatatgtggatagattactgaaaggcggctggaaattgcctcctggacgaaaagccgaggatgtacctcttgccgatgaggatgccgaaattaatcgacagttagaccaagtgttagatctcttccgatttgtacatggcaaagctgtatttgaggcattttacaagaacgaccttgctcgccggctactgatgggccgaagtgccagtgatgatgcagagaagagcatgctggcgaggctcaagacagaatgcggttccagcttcacacacaatctggaatctatgtttaaagacatggacgtggcgcgggatgaaatggcggcgtataattctattcagcgtgaacgcaagcaccgattaccggttgatttgaatgttagtgtgctctccgcggccgcgtggccgtcatatcccgatgttcaggtgcgaataccgcccgaaatcgcgacggctgtcagcgatttcgaaaagttttactatagtaaatacaacgggcgcaaacttaattggaagcaccaacttgcgcactgccagctgcgcgcaaggtttcccaaaggcgataaggagctggtagtcagttcattccaggccatcgtgcttctgctgtttaacgacatatcagaaaaggggacccttagctatctgcagatccaggaggcgacgaagttatctgaccaggagctgaaacggacccttcaatcgctcgcatgcgccaaataccgagtgcttgctaagaagccgaagggtcgcgaagtcaacacaacggacgagttctcgtacaacgagggattctccgacgtgaagatgcggatcaagatcaatcagatccagctaaaggagactaaggaggagaataagacgacacatgagcgggtggcagccgatcgtcattatgagacccaggcagctattgtgcggatcatgaagagtcggaagaccatcacacatcccgagttggtagcggaggtgattaaggcgacgcgcagccgaggagtgctcgaacctgcggatatcaagaagaacattgagaagctgattgaaaaggactacatggagcgagaagagggaaaccggtatcagtatgtggcataa

SEQ ID NO: 13678 - protein, 751 aa, Aspergillus oryzae RIB40
MAGTTLIEAICDDAYADSYFEKIWGQLDAALTAIFDGGKPEISLEELYKGAENVCRQGRASALARQLQERCRGHVSGKLRDTLVVKAAGGNNIDTLRAVVDSWTTWQSKLVTVRWIFYYLDQSFLLHSKEYPVIREMGLIQFRQHIFNDTVLQPQVLQGACDLVEADRDEGRSISADSSLLRNAIEFFHGLDVYTTGFEPLLVSESKKFFASWAQHEASGYLATFAENSHRLIEQEVDRCTLFSLNRSTKQKLSELLDQELVAEQENVLLNQNDILGLLRAGNKTALEKLYTLLQRRDLGAKLKTAFSSYIVEEGTSIVFDDDKEAEMVVRLLDFKQQLDETWNNSFHRHEELGHALREAFETFMNKGRKSGASGGTDNPKTGEMIAKYVDRLLKGGWKLPPGRKAEDVPLADEDAEINRQLDQVLDLFRFVHGKAVFEAFYKNDLARRLLMGRSASDDAEKSMLARLKTECGSSFTHNLESMFKDMDVARDEMAAYNSIQRERKHRLPVDLNVSVLSAAAWPSYPDVQVRIPPEIATAVSDFEKFYYSKYNGRKLNWKHQLAHCQLRARFPKGDKELVVSSFQAIVLLLFNDISEKGTLSYLQIQEATKLSDQELKRTLQSLACAKYRVLAKKPKGREVNTTDEFSYNEGFSDVKMRIKINQIQLKETKEENKTTHERVAADRHYETQAAIVRIMKSRKTITHPELVAEVIKATRSRGVLEPADIKKNIEKLIEKDYMEREEGNRYQYVA

SEQ ID NO: 13679 - DNA, 2283 bp, Coprinopsis cinerea okayama7#130
  CDS (1)..(2283)
atggcagcgcctgcgagcctcccaatgcccccgccgtcagcggatttggcgaccacctggaggtacctcgaggatggtgtcgaccatataatgaccaagttgcaaactggtgtctcatacacaaagtatatgtcgctctataccgtggcgtacaactattgcacatcgtccaaaatgcatggaagcgatggcagtatcggtctccagaaccgaacaggcgcaaacctgatgggctccgatctctacaacaatctcattcgatatttcaacggacatctacaaggactgcgcgaaagtgcagagaatttgcaagacgaagctctgttgcgatactatgctgctgaatgggatcgatacaccattggggcaaactatatcaataggttgttcacctatctcaatcgtcactgggtacggagagagcgagacgaaggacgaaagtcggtttaccctgtctacacccttgcactagtccagtggagaacgcagctcttcatcccaatacagcggaaacaaaagatagtcaacgctttgctacgcctcattgaaaaccaacgaaacggggacactatcgaccagggattggtcaagaaggttgtcgactcgttcgtctcgctgggcttggatgaagccgacatcaacaaggcctgtctggatatctaccgagagcacttcgaagtccccttcatcgacgcgacggaaacatactacaaacacgagtctgaggctttcctgggtagcaatagcgtgtcggactacctcaagaaggccgaggagcgactgcgagaagaagaggatcgggtagaacgatacttgaacacttccactcgcaaggctcttatcacgaaatgcgagcatgttctcatccgcgaccactcacaactaatgtgggatagcttccaatcgctcttggactacgacaaggacgaagaccttcagcggatgtacgctctcctttcccggattccagagggattagagcctctgcggaagagatttgaggaacatgtcaagaagtctggacaagacgctgttgccagactaatgggtgctaacaacgaagccctggatcctaaggaatatgttgatgctctcttggccgtccaccaaaagaacgccgacacagtcaacagaagcttccgcggcgaggctggctttgttgccagtttagacaaagcttgcagagagttcgtcaaccgcaacggagcaactggtaattcgaactccaaatctcccgaactcattgcgaagcatgcagatctgctgctgcggaagaacaacaaggtcgccgaagaaggagatctggaaggtgccttgaacagagtgatgattttgttcaaatacattgaagacaaggatatcttccagcagttctatactaccaagctctcgaagcgactgatccatggcgtatccgcttcggaagagagtgaatccagcatgatctccaaactcaaggaagcatgtggcttcgaatacaccaacaagcttcaacgcatgcagtctccagatatgagcctgagcaaggaccttacggaccaattcaagaccagaatggagcagaaccacgatgatatggacatcaatttcagcatcatggtccttggaaccaatttctggccgctgacagcacctcaacacgagttcattattcctgaagagatgctgacgacgtacgatcgattccagaagtactaccaaacgaaacactctggtcgaaagcttacctggttgtggaactactgcaaaaacgagctgaggacgaattacacgaatcaaaagtacatcctcatgaccagcactttccaaacggccatccttacccaatacaaccgcaatgataccctgtcactggatgagctcgttacggcgacgtcgataccgaaagaccatctcgtccaggtgttggcattgttggtcaaggccaaggtgctcatcaacgaggagacagatcagtacgaccttaacccaggattcaagtcgaagaagattcgggtcaaccttaacctgccgatcaaagcagagacaaaggcagagtcgaaggatgttatgaagactgtcgaggaggacaggaaatacgtgatccaagctaccattgttcgaatcatgaaggctcggaagacgatgaagaaccaggctctcctcgacgaggtcatctcacagatttcgcaacggtttactcctaaggtgccagatatcaaaaaggcaatcgacactcttctcgagaaagactatatagagcgggtagagggcacgagagatacattcgcctacctcgcatga

SEQ ID NO: 13680 - protein, 760 aa, Coprinopsis cinerea okayama7#130
MAAPASLPMPPPSADLATTWRYLEDGVDHIMTKLQTGVSYTKYMSLYTVAYNYCTSSKMHGSDGSIGLQNRTGANLMGSDLYNNLIRYFNGHLQGLRESAENLQDEALLRYYAAEWDRYTIGANYINRLFTYLNRHWVRRERDEGRKSVYPVYTLALVQWRTQLFIPIQRKQKIVNALLRLIENQRNGDTIDQGLVKKVVDSFVSLGLDEADINKACLDIYREHFEVPFIDATETYYKHESEAFLGSNSVSDYLKKAEERLREEEDRVERYLNTSTRKALITKCEHVLIRDHSQLMWDSFQSLLDYDKDEDLQRMYALLSRIPEGLEPLRKRFEEHVKKSGQDAVARLMGANNEALDPKEYVDALLAVHQKNADTVNRSFRGEAGFVASLDKACREFVNRNGATGNSNSKSPELIAKHADLLLRKNNKVAEEGDLEGALNRVMILFKYIEDKDIFQQFYTTKLSKRLIHGVSASEESESSMISKLKEACGFEYTNKLQRMQSPDMSLSKDLTDQFKTRMEQNHDDMDINFSIMVLGTNFWPLTAPQHEFIIPEEMLTTYDRFQKYYQTKHSGRKLTWLWNYCKNELRTNYTNQKYILMTSTFQTAILTQYNRNDTLSLDELVTATSIPKDHLVQVLALLVKAKVLINEETDQYDLNPGFKSKKIRVNLNLPIKAETKAESKDVMKTVEEDRKYVIQATIVRIMKARKTMKNQALLDEVISQISQRFTPKVPDIKKAIDTLLEKDYIERVEGTRDTFAYLA

SEQ ID NO: 13681 - DNA, 2295 bp, Coprinopsis cinerea okayama7#130
  CDS (1)..(2295)
atggccacgacatcaccccccgtcgacaccgactttgccaacatgcctcctcggacggcagatctcgaggagacatgggcatatctcaacggtggtgtcgaacacatcatgaccaatttcgagcttggtctgtctttcaaaggctacacaagcttgtattcaaccgtctataactactgcacatctaccaagatgcacggaaagctagatgggaaccgcacgggcgccaatttggtgggatcagacctttacagcaagttgagcacctactttgtgaaccatttcaagggcatgctcgagaaagccgcgacgctcgaggacatggatctactgcggtattacgccagcgagtgggaccggtacacacgaggcgcaaattatctaaatcgcctgttcacatacctcaatcgatactgggtgaagcgagagcgggatgaaggcaagaagggcgtgtatcaagtgtatacgctcgctctctcacaatggcggaatcatttcttcatgcacatccaaaaagacaattcgaaactttccaacgccgtattgaagctcatcacccagcagcggaatggtgaaatcgtcgatcagggtctgatcaagaaggtcgtcgattcgttcgtctctctgggtctggacaacgccgaccccaacaaagagtgcctggatatctacaaggaacaattcgaggtcgctttccttgcagcaaccgaggcttactacaagcaagagtctgaagccttcctcgccgcccattctgtttcggattacctgaagaaagctgaggatcgtctacgagaggaagagaacagggttgagcggtacttgcataacaagacccgcaaggaactcgtgagcaagtgcgagcatgtcctcatccgagagcactcagagttgatgtgggagagcttccaaagcctcctcgatttcgacaaggatgaggatctgcaacggatgtatgctttgctttcacgcattcccgagggtcttgaaccccttcgcaaacgcttcgagggccacgtcaaggcagctggcctgtcggccatcgggaggctcattggagagggtggtgccaatgtggattccctcgatgccaaggcttacgtggacgcattgttggaggtgcaccacaagaactcggagacggttgctcgcagctttaagagtgaagctggtttcgctgcaagtctcgataaggcttgcagagagtttgtcaaccgcaatgcggctactggctcgtcatcaacgaaatcgcctgaactcatcgccaagcatgccgatatgttgttgcggaagaacaacaagatggctgaggagggtgatttggagggtgctttgaaccgagtgatgattctcttcaagtacttggaagacaaggacgttttccagactttctatactaccaagctttccaagcgactgatccatggcgtctctgcttccgacgaagctgaagccagcatgatctcgaagctgaaggaagcctgcggtttcgagtacaccaacaagctccagcgcatgttcactgacatgagcctgagcaaggatctcacagacgccttcaaggagcgtcaacaacacgccgaggacaccgacatcaccttcaccgtcatggtcctcggtaccaatttctggcctctcaaccctcccacccacgaattcatcatcccacaagaaatcacccccacctacgagcgcttccaacgcttctaccaaaacaaacactctggtcgtaaactcacctggctgtggaactactccaagaacgaactccgcaccaactacacgaaccagaagtacatcctcatgacgagttcttatcagatggctgtgcttatgcagtacaaccggaatgacaccttgtctttggatgagcttgttgctgcgacctcgatctcgaaggagattttgacgcaggtgctggcggtgcttgtcaaggctaaggtcttgatcaacgaggagcccgagcagtacgatcttaaccctggcttcaagtcgaagaagattcgtgtcaacctcaacttgcccatcagggctgaggtcaaggctgagtcctcggatgtcctcaaggctgtcgatgaagatcgtaaatatgtcattcaagctaccattgttcgtatcatgaaagctaggaagaccatgaagaaccaggccttgatccaggaggtcatctcccagatcacacagcgtttcgctcccaagattcccgacatcaagaaggccatcgagaccctcttggagaaggaatacatcgagagagtggaaggctccaaggacaccttcgcttacgtcgcctaa

SEQ ID NO: 13682 - protein, 764 aa, Coprinopsis cinerea okayama7#130
MATTSPPVDTDFANMPPRTADLEETWAYLNGGVEHIMTNFELGLSFKGYTSLYSTVYNYCTSTKMHGKLDGNRTGANLVGSDLYSKLSTYFVNHFKGMLEKAATLEDMDLLRYYASEWDRYTRGANYLNRLFTYLNRYWVKRERDEGKKGVYQVYTLALSQWRNHFFMHIQKDNSKLSNAVLKLITQQRNGEIVDQGLIKKVVDSFVSLGLDNADPNKECLDIYKEQFEVAFLAATEAYYKQESEAFLAAHSVSDYLKKAEDRLREEENRVERYLHNKTRKELVSKCEHVLIREHSELMWESFQSLLDFDKDEDLQRMYALLSRIPEGLEPLRKRFEGHVKAAGLSAIGRLIGEGGANVDSLDAKAYVDALLEVHHKNSETVARSFKSEAGFAASLDKACREFVNRNAATGSSSTKSPELIAKHADMLLRKNNKMAEEGDLEGALNRVMILFKYLEDKDVFQTFYTTKLSKRLIHGVSASDEAEASMISKLKEACGFEYTNKLQRMFTDMSLSKDLTDAFKERQQHAEDTDITFTVMVLGTNFWPLNPPTHEFIIPQEITPTYERFQRFYQNKHSGRKLTWLWNYSKNELRTNYTNQKYILMTSSYQMAVLMQYNRNDTLSLDELVAATSISKEILTQVLAVLVKAKVLINEEPEQYDLNPGFKSKKIRVNLNLPIRAEVKAESSDVLKAVDEDRKYVIQATIVRIMKARKTMKNQALIQEVISQITQRFAPKIPDIKKAIETLLEKEYIERVEGSKDTFAYVA

SEQ ID NO: 13683 - DNA, 2337 bp, Culex quinquefasciatus
  CDS (1)..(2337)
atgtctaaactaaactcacatggcgcgaccggactcaggaacatcaatctggaggagatatgggccgatctggagagtggcataaagcagatctacaagcaggagaaaggcctccggtcgccccgttacatgcagctctacacacatgtctacaactactgtaccagcgtgcaccagcagcctgccaaccggcaaacgtcctcaaaggtctcgaagaagggaacggccattccgtccggcggagcccaactcgttggtcaggagctgtacaaacggctgaaggagttcctcgaggagtatctgattgcgttgcaggagaatggcatcgacctgatggatgaggaagtgctgagcttctacacgaaacgatgggaagagtaccagttctcgagcaaggtgctgaacggtgtctgtggctacctgaaccggcactgggtgaagcgcgagtgcgaggagggccgcaaggacgtgtacgagatctaccagctggcgctggtcacttggcgcgggaatctgttcaagcacctaaacaagcaggtcacgaacgccgtgctgaagctgattgagcgcgaacggaacggagagacgatcaactcccggctcgtgtccggcgtaattaactgctacgtcgagctgggactaaacgaggaggatccgaacgccaagggtcagaacctttccgtgtacaaggaaagcttcgagaatatcttcctggaggacaccgagatgttctacacccgcgagtctgcggaattcctgcgggagaatcccgtcaccgagtacatgaagcgagtggagttgcgcctgaacgaggagcagaaacgtgtgcaagtgtatttgcatgaaagtacgcaggacaggctggcgaagacgtgcgagcgagtgttgatccagaagcacctggaacagttccgcaccgagttccagaacctgctcgactcggacaagaactcggatctgcgcagaatgtactcgctggtggcacgcatcaccgagggcctggtcgagttgaaggccatcttggaaacccacatccacaaccaaggcctggcggcgattgccaagtgcggcgaggcggcactcaatgacccgaagatctacgtccagaccatcctggaggtgcacaagaaatacaacgcgctggtacttacggccttcaacaacgacagcggattcgtggccgcgctggacaaggcctgcggcaagtttatcaacacgaacgccgtcacggaagcgagcaaaagcgccagcaagagccccgagctgctggccaagtattgtgatttgctgctgaaaaagtcgagcaaaaatcccgaggaagctgaactggaagacacgctgaaccaggtgatggtcgtgttcaagtacatcgaggacaaggacgtgttccagaagttctacagcaagatgctggccaaacggctgtgccaccacatgtccgccagcgacgatgccgaagcgtcgatgatttcgaagctgaagcaggcgtgcggcttcgagtacaccagcaagctgcagcggatgttccaggacattggcgtctcgaaggatctcaacgagcagtaccgccagcacgtcaaggggctgcgcgaggcctccaagcagaccggcaacgatattgactttagtattctagtgctgtccagcggctcctggccgttcaaccagagcttcaccttttccttgccgttcgagctggaacaatctgtgcaccggttcaacaacttttacgccaagcaacattccggacggaagctcaactggctgtacaacatgtgccgtggcgaactcatcaccaactgtttccggctgaggtacacgcttcaggccagcaccttccagatggccgtcctgctacagttcaacgagcaaaagtcgtggaccatccagcagctaggtgaaaataccagcatcaaccaggagagtttaatccaggtgctccagattctgctgaaatcgaaactgctcacatcgtccgacgacgaggccaatctcacgacaagctcgtcggtagaactgaacactggcttcaagaacaaaaagctccgaatcaacatcaacttcccgctcaagaccgaactgaaggtggaacaggaggccacccacaagcacatcgaggaggaccgaaagatcctgatccaggcggcgatcgtgcggattatgaagatgcgcaaggtgctaaaccacacgtgtcttgtcggcgaggtgctgaaccagctgtcgacgcgattcaagccgaaagtgcaggtcatcaagaaatgtattgacatcctcatcgagaaggaatatctggagcgccaggaaggacagaaggacacctacagctatctggcttga

SEQ ID NO: 13684 - protein, 778 aa, Culex quinquefasciatus
MSKLNSHGATGLRNINLEEIWADLESGIKQIYKQEKGLRSPRYMQLYTHVYNYCTSVHQQPANRQTSSKVSKKGTAIPSGGAQLVGQELYKRLKEFLEEYLIALQENGIDLMDEEVLSFYTKRWEEYQFSSKVLNGVCGYLNRHWVKRECEEGRKDVYEIYQLALVTWRGNLFKHLNKQVTNAVLKLIERERNGETINSRLVSGVINCYVELGLNEEDPNAKGQNLSVYKESFENIFLEDTEMFYTRESAEFLRENPVTEYMKRVELRLNEEQKRVQVYLHESTQDRLAKTCERVLIQKHLEQFRTEFQNLLDSDKNSDLRRMYSLVARITEGLVELKAILETHIHNQGLAAIAKCGEAALNDPKIYVQTILEVHKKYNALVLTAFNNDSGFVAALDKACGKFINTNAVTEASKSASKSPELLAKYCDLLLKKSSKNPEEAELEDTLNQVMVVFKYIEDKDVFQKFYSKMLAKRLCHHMSASDDAEASMISKLKQACGFEYTSKLQRMFQDIGVSKDLNEQYRQHVKGLREASKQTGNDIDFSILVLSSGSWPFNQSFTFSLPFELEQSVHRFNNFYAKQHSGRKLNWLYNMCRGELITNCFRLRYTLQASTFQMAVLLQFNEQKSWTIQQLGENTSINQESLIQVLQILLKSKLLTSSDDEANLTTSSSVELNTGFKNKKLRININFPLKTELKVEQEATHKHIEEDRKILIQAAIVRIMKMRKVLNHTCLVGEVLNQLSTRFKPKVQVIKKCIDILIEKEYLERQEGQKDTYSYLA

SEQ ID NO: 13685 - DNA, 2433 bp, Culex quinquefasciatus
  CDS (1)..(2433)
atgagtcgcatttcgacgcagaaaaaggaaggcaagatgcggattcgggctttcccgcaaattacgacccactcccgtacccatgatcacgcgctagcgcaatcccgggtttcgtcgtcgtcacggtcgtccgccatgaagagcagcggatcagcagtcgccgccagcagcggcagtcgtattccccgaccagctgccgctctccgccgcaggacagtgcgccgtcgttccgttcccctgcacgaacgccacccgatgaccatggacgagaagtacgtcgagtccatctggtcgctgctgaagaacgccatccaggagattcagaagaagaacaactcgggcctgtcgttcgaggagctgtaccggaatgcgtacacaatggtgctgcacaagcacggcgagcggttgtacacggggttgaaggacgtggtcacacagcacctggagacgaaggtgcgcgaagaggtgctgcgtagcttcaactccaactttctgcagacgctcaaccaggcctggaacgaccaccagacgtcgatggtgatgatccgggacattttgatgtacatggaccgggtgtacgtgcagcagaacgacgtggacaacgtgtataatttgggtttgatcatcttccgggatcaggtcgtgcggtatgggaggattcgggatcacatgcgcgaaacgctgctgaacatggtgatgtgcgagcggaagggtgaggccattgaccatatcgcgatcaagaacgcgtgccagatgttgatggttttgggcatcaactgccgctgggtgtacgaggaggactttgagcgaccgttcctgacgcagtcggcagctttctacaagctagaatctcaaaaattcctgtcggagaacagcgccagcgtgtacatccggcgggttgaggctcgcatcacggaggaagccgagcgggccaagctgtatctggacgagagcaccgagagccgcatcgtggaggtggtcgaggacgagctcatcaagaagcacatgcgcacgatcgtcgacatggaaaactccggcgtcgtgtacatgctgaagaacaccaaaaccgacgacctgggctgcatgtacaagctgttctcgcgggtcaacggcggcctcaagacgatcgccgactgcgtctcgcagcacctgcgctcgatgggcaagaacctggtgaaggaggaggaaagcggcaccaacccgattacgttcgtgcagaacctgctcgatctgaaggatcgcttcgaccacttcctgcaccactcgttcagcaacgacaaaatcttcaagaacatgatatcgtccgactttgagcatttcctcaacctgaacagcaaatcgcccgagtatctgtcgctgtttatcgacgacaagctgaaaaagggctgcaaggggatgtccgagcaagaaattgaaacgatcctggacaagaccatggtattattccgatatttgctggagaaggacgtgttcgagcgatactacaaggcacatctggcgaagcggctgctgctgaacaagtcggtcagcgatgactccgagaagaacatgatatcgaaattaaagactgaatgcggttgtcaatttacctcaaaattggagggcatgttcaaggacatgtccgtgtccaacacggtgatggaggagttcaagaaccacatcagcaacgacccgtccgcgctggacggggtcgagctgtcggtccggatcctgaccaccggcttttggcccacgcagtctgccacaccaaactgcaacatcccgctggcaccgcggagggcgttcgaaacgttcaagcggttctacctggccaaacactcgggccggcagttgacgctgcagccgcagctcggcaccgtgtacatgaacgccgagttctacggcgtcaaggccgagaaggaaagtgccgagggtactgcagcaatgtgcgtgctgatgctgttcaacaaccgggagcggttgtcgtacgacgagatccagcaggagacggacatccccggcaaggacctgatccgggcgctgcagtcgctgtcgatgggcaagcagcagcagcgtctgctggtgcggacgcccaagaccaaggacatcgagccgacgaacgtgttctacgtaaacgacgcgttcgtgtccaagttccacaaggtcaaaattcaaacggtggccgccaagggcgagtcggaaccagagcggaaggaaacccgcagcaaggtggacgaagaccgcaagcacgagatcgaggccgcgatcgtgaggatcatgaaggcgcgcaagaagatggcccacaatctgctggtatcggatgtgactacccagctcaagagccgattcatgccgtccccggtgatcatcaagaagagaatagagggcctgatcgagcgcgaatatctggcccgaacgcccgaggaccgcaaggtttatgtgtatctagcttaa

SEQ ID NO: 13686 - protein, 810 aa, Culex quinquefasciatus
MSRISTQKKEGKMRIRAFPQITTHSRTHDHALAQSRVSSSSRSSAMKSSGSAVAASSGSRIPRPAAALRRRTVRRRSVPLHERHPMTMDEKYVESIWSLLKNAIQEIQKKNNSGLSFEELYRNAYTMVLHKHGERLYTGLKDVVTQHLETKVREEVLRSFNSNFLQTLNQAWNDHQTSMVMIRDILMYMDRVYVQQNDVDNVYNLGLIIFRDQVVRYGRIRDHMRETLLNMVMCERKGEAIDHIAIKNACQMLMVLGINCRWVYEEDFERPFLTQSAAFYKLESQKFLSENSASVYIRRVEARITEEAERAKLYLDESTESRIVEVVEDELIKKHMRTIVDMENSGVVYMLKNTKTDDLGCMYKLFSRVNGGLKTIADCVSQHLRSMGKNLVKEEESGTNPITFVQNLLDLKDRFDHFLHHSFSNDKIFKNMISSDFEHFLNLNSKSPEYLSLFIDDKLKKGCKGMSEQEIETILDKTMVLFRYLLEKDVFERYYKAHLAKRLLLNKSVSDDSEKNMISKLKTECGCQFTSKLEGMFKDMSVSNTVMEEFKNHISNDPSALDGVELSVRILTTGFWPTQSATPNCNIPLAPRRAFETFKRFYLAKHSGRQLTLQPQLGTVYMNAEFYGVKAEKESAEGTAAMCVLMLFNNRERLSYDEIQQETDIPGKDLIRALQSLSMGKQQQRLLVRTPKTKDIEPTNVFYVNDAFVSKFHKVKIQTVAAKGESEPERKETRSKVDEDRKHEIEAAIVRIMKARKKMAHNLLVSDVTTQLKSRFMPSPVIIKKRIEGLIEREYLARTPEDRKVYVYLA

SEQ ID NO: 13687 - DNA, 2280 bp, Culex quinquefasciatus
  CDS (1)..(2280)
atgaatctggccgagaacgaccggaagagggccaacttttccgccctcagcaacacgaacggagcggtgatcaagatgaccaccaacaccggaaccgggaagcccggggacattaagaagattgtcatcaaaaacttcaaaaccaagcccacactaccggagaactaccaggagacgacatggcagaagctgcgcgaagcggtcatcgccatccagctgtcgaaacggatcgagtactcgctcgaggagctgtaccaagcggtggagaacatgtgctcgcacaagatggactcgcagctgtacgtgaatctgacggcgctcgcggagcagcacgtcaaggccaacattacgccgttcatggccgagtccatcgacaagctggtctacctgaagaagatgaacgactgctggcagtcgcactgtcagcagatgattatgattcgcagcatcttcctgtatctggaccggacgtacgtgctgcagaatccgaccgtccactcgatctgggacatggggctggagctgttccgggatcacatagcgatgaacacgctcgtgcaggcacgcaccgtcgaggggattctgattctgatcgaaaaggaacggaatggggatgccgtcgaccgggcactgctcaaaagtttgctccggatgttgtcggacctgcagatctacaaggaagcgttcgagcaaaagttcctggtcgcgacgaagcatctgtaccagtcggaggggcaggccaagatggaagtgctcgaagttccggagtatctgctgcacgtggataagcgattgcaggaggaaaatgaacgtctgctgcactatttggacagttgcacgaagcaccagctgattgtgacggtcgagcggcaactcatcaccgaacacattaccggcatcctgcagaagggcctcgatcagctgttggaagagaaccgcctgaccgatttgacgctgctttattcgctgtttagccgggtcaaaaacggaaccatcgagctgtgcgcgtcgttcaacgcgtacatcaagaagaaaggacgcaccatcgtcatcgacccggagaaggacaagtccatggtgcaggacctgctggactttaaggacaaactggacaatatcgtgaccaagtgcttcgacaagaacgaaaagttctccaactcgctgcgagaagcgttcgagttcttcgtcaaccagcggtccaacaagccggccgagctgattgccaagtacgtggacatgaagttgcgcgccggcaacaaggaagccaccgaggaggagctcgagcagatcctggacaagatcatggtccagttccggttcattcacggcaaggacgtgttcgaggcgttctacaagaaggacctcgccaagcggctgctcgtcggcaagtcggcctccgttgacgccgagaagagtatgttgtcgaagctgaagcaggagtgcggcggcggtttcacctccaagctcgagggcatgttcaaggacatggagctcagcagggacattaacattgcgttccggcagtacatggccaactcggagggcaaggagctgcagaacatcgacctcaccgtcaacatcctgacgatgggcttctggccgacgtacccggtgatggaggtgacgctgccccaggagctgctccagtaccagtccatcttcaacaagttctacctggcgaagcacagcggccggaagctacagtggcagcccacgctcggccattgcgtgctgaaggcgcgcttcgatgctggcccgaaagacctgcaggtttcactgttccaagcgctggtgctgctgctgttcaactacagtccgaccattacgttcgaggagattaaggctgcgataaacattgaggacggcgagctgcgccgtacgctgcagtcgctggcctgcggcaaggcccgcgtcgtctccaagatcccgaaggggcgcgaggtcgaagacaatgacaagttccagttcaacaatgaatttacgaataagctctttaggattaagatcaaccagatccagatgaaggaaacgacggaagagcagaaagccacggaggaacgcgtctaccaggaccggcagtaccagatcgacgccgcgatcgtgcgcatcatgaagatgcggaaaacgctcagccacaatctgctcatcagcgagctctacaagcagctgacgttccctgtaaagccggctgacttgaagaaacggatcgaatcgctcatcgatcgggactacatggagcgggacaaggacaaccagaatcaatacaactacgtcgcttaa

SEQ ID NO: 13688 - protein, 759 aa, Culex quinquefasciatus
MNLAENDRKRANFSALSNTNGAVIKMTTNTGTGKPGDIKKIVIKNFKTKPTLPENYQETTWQKLREAVIAIQLSKRIEYSLEELYQAVENMCSHKMDSQLYVNLTALAEQHVKANITPFMAESIDKLVYLKKMNDCWQSHCQQMIMIRSIFLYLDRTYVLQNPTVHSIWDMGLELFRDHIAMNTLVQARTVEGILILIEKERNGDAVDRALLKSLLRMLSDLQIYKEAFEQKFLVATKHLYQSEGQAKMEVLEVPEYLLHVDKRLQEENERLLHYLDSCTKHQLIVTVERQLITEHITGILQKGLDQLLEENRLTDLTLLYSLFSRVKNGTIELCASFNAYIKKKGRTIVIDPEKDKSMVQDLLDFKDKLDNIVTKCFDKNEKFSNSLREAFEFFVNQRSNKPAELIAKYVDMKLRAGNKEATEEELEQILDKIMVQFRFIHGKDVFEAFYKKDLAKRLLVGKSASVDAEKSMLSKLKQECGGGFTSKLEGMFKDMELSRDINIAFRQYMANSEGKELQNIDLTVNILTMGFWPTYPVMEVTLPQELLQYQSIFNKFYLAKHSGRKLQWQPTLGHCVLKARFDAGPKDLQVSLFQALVLLLFNYSPTITFEEIKAAINIEDGELRRTLQSLACGKARVVSKIPKGREVEDNDKFQFNNEFTNKLFRIKINQIQMKETTEEQKATEERVYQDRQYQIDAAIVRIMKMRKTLSHNLLISELYKQLTFPVKPADLKKRIESLIDRDYMERDKDNQNQYNYVA

SEQ ID NO: 13689 - DNA, 2292 bp, Laccaria bicolor S238N-H82
  CDS (1)..(2292)
atgcccccagcctccgcagacttggccacgacgtgggcctttctcgaagaaggagtcgaccatatcatgacgaagttacagacaggtgtttcttactccaagtatatgtcattgtatactgtagcatacaactactgcacgtcctccaagatgcatgggacatcagactcaatcgggatagggagccggacaggagcgaacctgatgggatctgatctgtataataatctaatccgatacttcgtggcgcacctgaaaggcttgcgggataaaacagacgcgttacaggacgaagccttgctacgatattatgctgaggagtgggatcggtatacgacaggcgcgaactatatcaatcggcttttcacgtacttgaatcgtcattgggtaaagcgggagagggacgagggacgaaagggagtgtatccagtgtacactcttgctttggttcaatggaaaaacaatctattcattcccgtacaacaaaaacagacaaaactagcaaacgccatcctcagactgattgaagcgcaacgaaacggggacaccattgaccaaggcttggtgaagaaggttgtcgactcctttgtctcgcttggtctagacgacacagacacgaacaaggcatgtctggatgtctacaaagaacatttcgaattgcccttcatcgacgcgactgagaaatactacaaacaagaatctgaatcctttttagcagccagtagtgtttcggactacctaaaaaaggcggaagatcgcctgcgggaagaggaggatcgagttgagcgatatctcaacactcaaacaagaaagcccttgatcggcaaatgtgaacatgttcttatccacgaacggtctaaattgatgtgggatagcttccaatcgttgctggactttgacagggatgaagatttgcagagaatgtactctttgttgtcgcggatcccggaaggtctggaaccgttgcgcaaaaacttcgaggagcacgtcaaaaaggctggattggcggctgtatcaaaactcgtcggggaatccggtgcgaacgttgatgctttggaccccaaggcatacgtcgatgcgctgcttgacgttcacaggaagaattctgataccgtcaccaggagctttagaggagaggctggattcgtggcaagcttggacaaagcgtgtcgagagttcgtgaacaggaacgctgcgactggaccctcaaactcgaaatctcctgagctgatcgccaagcatgctgatcttctcctacggaaaaacaacaaactggcggaagaaggcgatctggaaggtgctttgaaccgcgtgatgattttgttcaaatatatcgaagacaaggacgtctttcagacattctacaccacgaaactgtccaagcgcctcatacatggcgtctccgcgtcggatgagagcgaggccagtatgatttcaaagctcaaggaggcttgcggctttgagtacaccaacaagctccagcgtatgtttacagacatgagtcttagcaaagatttgacggatcagttcaagagtcggatggagcaaactcacgacgatatggacattagcttcaccatcatggtgctgggcaccaacttttggccgttgcatccgcctccgcacgagttcttgatcccggcggagatcctccccacttacgatcgtttccagaagtactaccagatgaagcactctggtcgaaagctaacatggctctggaattactcaaaaaacgaactgcggacaaattatctgaatcagaagtatattctgatgacgagcacgtttcagatggctgttctgctgcagtataataaaaacgacacactatcactttctgaactgtcggccgctacctcgatacccaaggactatcttggtcaggtgttggcgatattggtgaaggcgaagatcctcatcaatgaggaaaccgaccagtacgatttaaaccctggtgggtccattcagcttgccatatgtttcaagtcgaagaagataagggtgaatctcaatttgccaataaaagctgaaacgaaaacggagtcgacggacgttctcaagaccgttgacgaagacagaaaatacgtgatacaggcgaccatcgttcgaatcatgaaggcccgaaaaacgatgaagaaccagcccttgattcaagaagtcatttcgcagatttcacaaagattcgcaccgaagattccagatattaagaaggctatcgacactctcctcgagaaggagtacattgaacgagtggaaggaacaagagacacgtttgcatacatggcatag

SEQ ID NO: 13690 - protein, 763 aa, Laccaria bicolor S238N-H82
MPPASADLATTWAFLEEGVDHIMTKLQTGVSYSKYMSLYTVAYNYCTSSKMHGTSDSIGIGSRTGANLMGSDLYNNLIRYFVAHLKGLRDKTDALQDEALLRYYAEEWDRYTTGANYINRLFTYLNRHWVKRERDEGRKGVYPVYTLALVQWKNNLFIPVQQKQTKLANAILRLIEAQRNGDTIDQGLVKKVVDSFVSLGLDDTDTNKACLDVYKEHFELPFIDATEKYYKQESESFLAASSVSDYLKKAEDRLREEEDRVERYLNTQTRKPLIGKCEHVLIHERSKLMWDSFQSLLDFDRDEDLQRMYSLLSRIPEGLEPLRKNFEEHVKKAGLAAVSKLVGESGANVDALDPKAYVDALLDVHRKNSDTVTRSFRGEAGFVASLDKACREFVNRNAATGPSNSKSPELIAKHADLLLRKNNKLAEEGDLEGALNRVMILFKYIEDKDVFQTFYTTKLSKRLIHGVSASDESEASMISKLKEACGFEYTNKLQRMFTDMSLSKDLTDQFKSRMEQTHDDMDISFTIMVLGTNFWPLHPPPHEFLIPAEILPTYDRFQKYYQMKHSGRKLTWLWNYSKNELRTNYLNQKYILMTSTFQMAVLLQYNKNDTLSLSELSAATSIPKDYLGQVLAILVKAKILINEETDQYDLNPGGSIQLAICFKSKKIRVNLNLPIKAETKTESTDVLKTVDEDRKYVIQATIVRIMKARKTMKNQPLIQEVISQISQRFAPKIPDIKKAIDTLLEKEYIERVEGTRDTFAYMA

SEQ ID NO: 13691 - DNA, 2262 bp, Laccaria bicolor S238N-H82
  CDS (1)..(2262)
atgccacctcggacggcggatctggaggagacatggacgttcttgaatggaggcgtcgaccacatcatgactaactttgagacggggttgtccttcaaagggtacacgagtttatactcgaccgtctacaactattgcacatcgaccaaaatgcatggaaagctagaaggcaatcgcactggcgctaatttggttggatccgatctctacaacaaactcagcggatattttgttgagcatttcaaaggaatgcttgagaaaactgaaactctgcaagatgtcgacctcctgcggtactacgccacagaatgggataattacactagaggcgctaattatctcaaccgtctattcacatacctcaatcgatactgggtgaagcgcgagcgagatgagggaaagaaggccgtgtatcaggtgtacacgcttgccctatcacaatggaaaagccatttcttcatgcacatacaaaatgacaacgcgaaattggctggtgctgtacttcgtcaaatcacacagcaaaggaatggcgaggtcgtagatcagggtctgatcaagcgggttgtggattcattcgtgtcacttggccttgataacgccgaccctaataaggaatgcctcgatatctataaggaccaattcgaaacggcattcatcgctgccacggagcagtattacaagaaggaatcagataccttcctagctgaaaattcagtctcggactacctcaagaaagccgaagatcgcctgcgagaggaggagaatcgtgttgagcgttatctacacaacaagacgcgaaaagagcttgtcagcaaatgcgaagaggtcctgattcgcgagcactccgagttgatgtgggaaagcttccaatcgttgctcgacttcgacaaggatgaagatctgcaacggatgtacgcccttctctcaaggattccagaaggtttggaacctttgcgaaaaaggtttgaagcccacgtcaaactatctggtctctctgctatcgagaagttggttggccaggccggcgccgccgctgcgaatgcggaagttgaccccaaagcatatgtggatgcgctcctcgaggtttaccacaagaactcagagactgtaaacagaagtttcaagggcgaggcaggatttgcggcaagtttggacaaagcctgccgagagtttgtcaatcggaatgcggctactggcggctcatcgaccaaatcgccagagcttattgccaagcacgcggacatgcttttgagaaagaacaacaagatggcagaggaagacgacctggagggtgctttgaaccgtgttatgattttgttcaaatacctggaagacaaggatgtgttccagacattctataccaccaagctttcaaaacggttgatccatggtgtctctgcgtccgacgagagcgaggccagcatgatttcgaaactcaaagaagcttgcggtttcgagtacaccaacaagctccaacgcatgtttaccgacatgagtttgagcaaggatcttactgactcattcaaggaacgcatgtcgcaaaatcacgatgacatggacatcaccttcagcatcatggtcttgggaactaatttctggccactcaatccaccacctcacgatttcgtcatccccaccgagatcgtgcccacctacgaccgattccagaagtactaccagacgaagcactctggccgtaaactcacctggctatggaactattccaagaacgagctgcgcacgaactatacgaaccaaaagtacatcctgatgacgagctcgtatcagatggcggtactgttgcagtacaatcggaccgatacgctttcgttggatgaactggtcactgctacttcgatcacgaaggacatcttgacccaggttctggctgtgttggttaaggcgaaggtgttgatcaacgaggagaaggatcagtacgatctcaatcccaacttcaagtcgaagaagatccgtgtcaacctgaatctgccaattaaggccgaagtcaaggctgaatcttcggatgttttgaaggctgttgatgaggacaggaaatatgtcattcaagccacgattgttcgaataatgaaggcaaggaagacgatgaaaaatcaggctttgatccaggaagtcatctctcagatctctcaacgatttgcgccaaagattcctgacatcaagaaggcgatcgaaaccctcttggagaaggaatacattgaacgagtcgatggttccaaggacacgttcgcatatgttgcttga

SEQ ID NO: 13692 - protein, 753 aa, Laccaria bicolor S238N-H82
MPPRTADLEETWTFLNGGVDHIMTNFETGLSFKGYTSLYSTVYNYCTSTKMHGKLEGNRTGANLVGSDLYNKLSGYFVEHFKGMLEKTETLQDVDLLRYYATEWDNYTRGANYLNRLFTYLNRYWVKRERDEGKKAVYQVYTLALSQWKSHFFMHIQNDNAKLAGAVLRQITQQRNGEVVDQGLIKRVVDSFVSLGLDNADPNKECLDIYKDQFETAFIAATEQYYKKESDTFLAENSVSDYLKKAEDRLREEENRVERYLHNKTRKELVSKCEEVLIREHSELMWESFQSLLDFDKDEDLQRMYALLSRIPEGLEPLRKRFEAHVKLSGLSAIEKLVGQAGAAAANAEVDPKAYVDALLEVYHKNSETVNRSFKGEAGFAASLDKACREFVNRNAATGGSSTKSPELIAKHADMLLRKNNKMAEEDDLEGALNRVMILFKYLEDKDVFQTFYTTKLSKRLIHGVSASDESEASMISKLKEACGFEYTNKLQRMFTDMSLSKDLTDSFKERMSQNHDDMDITFSIMVLGTNFWPLNPPPHDFVIPTEIVPTYDRFQKYYQTKHSGRKLTWLWNYSKNELRTNYTNQKYILMTSSYQMAVLLQYNRTDTLSLDELVTATSITKDILTQVLAVLVKAKVLINEEKDQYDLNPNFKSKKIRVNLNLPIKAEVKAESSDVLKAVDEDRKYVIQATIVRIMKARKTMKNQALIQEVISQISQRFAPKIPDIKKAIETLLEKEYIERVDGSKDTFAYVA

SEQ ID NO: 13693 - DNA, 2295 bp, Laccaria bicolor S238N-H82
  CDS (1)..(2295)
atgacctcatcatctgcagccccagccagtgactttgccaacatgcccccccgggcggatctggaggagacatggacgttcttgaagggaggcatcgaccacatcatgactaacgtcgagacggtgccccccgaaggctatacgcgtttatactcggccgtctataactactgcacatctagcaaaacgccaggaaaccaaggcaatcgcactggcgctaatatgtctggatccgatctctacagcaaactcagcgaatattttgttgtgcattctgaaggaatgcttgaaaaaaccgaaactctgcaagaggtcgacctcctgcggtactacgccaccgaatgggacacttatactagaggggctaactatgtcaaccgtttattcgcatttctcaatcgacactgggtgaagcgccagcaagacgagggaaggaaggtttatcaggtgtacacgcttgccctgtcacaatggaaaacccatttcttcatgcacatacaaaatgacaacgcgaaactggccggtgctgtacttcgtcaaatcacacggcaaaggactggcgaggtcgtagatgatcagggtctgatcaagcgggttgtggattcattcatatcacttggccttgataacgccgatcctagtaaggaatgcctcaatatatataaggaccagttcgaaacggcattcatcgctgccacggagcagtattacaagaaggaatcagaggcctttctagctgaaaattcggtgttggactacctcaagaaagccgaagattggctgcgagaggaggagaatcttgttgagcgttatctacacagcaagacgcgaaaagagcttgtcagcaaatgtgaagcggtcctgattcgcgagcactccgatctgatatggaaaagcttccaaccgttgctcgactccgataaggatgaagatgtgcaacatatgtatacgcttgtttcaaggtttcaagaaggtttggaacttctccggaaaaagttcaaagctcgcgtcaaactatctggtctctccgctatcgagaatgtggttagccaggccggcgccgctgctgcgaacgcagaagtcgaccccaaagcatatgtggctgcgctcctcgaggtttaccacaagaattcggagactgtaaacataagttttaagggcgaggcaggactcgctgcaagtttggacaaagcctgccaagaatttgtcaatcggaacgctgctactggtggctcatcgaccaagtcgccagagcttattgccaagtacttggacatgcttttgagaaagaacaacaagatggcagaggaagacgacctagagggtgctttgaaccatgtcatgattctgtttcaatatctggaagacaaggatgtgttccagacattctataccaccaagctttcaaaacggttgatccatggtgtctctgcgtccgacgagagcgaggccaacatgatttcgaagctcaaagaggcttgcggtttcgagtacaccgacaagctccaacgcatgtttacggacatgagtttgagcaaggatcttacggactcattcaaggattgcatgtcgcaaaaccacggtgacatggtcatcaccttcagcatcatggtcttaggaaccaatctatggccactctatccaccaccacacgatttcgtcatccccaccgagatcgtacccacctacgaccgattccagaagtactaccagacgaagcactctggccgtaaactcacctggttatggaactactccaagaatgagctgcgcacgaactatacgaaccaaaagtacatcctgatgacgagctcataccagatggcggtactattgcagtacaactgggccgatacgctttcgttggatgagctggtcactgctacttcgattacgaaggacatcttgacccaggttctggttgtgttggttaaggtgaagatgttgatcaacgaggagaaggaccagtacgatcttaatcacaacttcaagtcgaagaagatccgtgtcaacctgattcagccaatcaaagccgaagtcaagaccgaatcttcggatgttttgaaggctgttaatgagcacagaaaatatgtcattcaagctacgatcgttcgaataatgaaggcaaggaaaaccatcaaaagtcaggctttgatccaggaagtcatctctcagatctctcaacgctttgcgccaaagattcctgacatcaagaaagcgatcgaaatcctcttggagaaggaatacattgaacgagtcgatggttccagggacacgttcgcatatgttgcttga

SEQ ID NO: 13694 - protein, 764 aa, Laccaria bicolor S238N-H82
MTSSSAAPASDFANMPPRADLEETWTFLKGGIDHIMTNVETVPPEGYTRLYSAVYNYCTSSKTPGNQGNRTGANMSGSDLYSKLSEYFVVHSEGMLEKTETLQEVDLLRYYATEWDTYTRGANYVNRLFAFLNRHWVKRQQDEGRKVYQVYTLALSQWKTHFFMHIQNDNAKLAGAVLRQITRQRTGEVVDDQGLIKRVVDSFISLGLDNADPSKECLNIYKDQFETAFIAATEQYYKKESEAFLAENSVLDYLKKAEDWLREEENLVERYLHSKTRKELVSKCEAVLIREHSDLIWKSFQPLLDSDKDEDVQHMYTLVSRFQEGLELLRKKFKARVKLSGLSAIENVVSQAGAAAANAEVDPKAYVAALLEVYHKNSETVNISFKGEAGLAASLDKACQEFVNRNAATGGSSTKSPELIAKYLDMLLRKNNKMAEEDDLEGALNHVMILFQYLEDKDVFQTFYTTKLSKRLIHGVSASDESEANMISKLKEACGFEYTDKLQRMFTDMSLSKDLTDSFKDCMSQNHGDMVITFSIMVLGTNLWPLYPPPHDFVIPTEIVPTYDRFQKYYQTKHSGRKLTWLWNYSKNELRTNYTNQKYILMTSSYQMAVLLQYNWADTLSLDELVTATSITKDILTQVLVVLVKVKMLINEEKDQYDLNHNFKSKKIRVNLIQPIKAEVKTESSDVLKAVNEHRKYVIQATIVRIMKARKTIKSQALIQEVISQISQRFAPKIPDIKKAIEILLEKEYIERVDGSRDTFAYVA

SEQ ID NO: 13695 - DNA, 2310 bp, Pyrenophora tritici-repentis Pt-1C-BFP
  CDS (1)..(2310)
atggcctccacaatgccacctgtgcctgcaaaggacgatgtgcacgctacgtggaagtacttagaggctggtgtggataagattatgaccaacctgcgcgccggtgtcgacatgaagacatacatgggcctttacaccgccattcataacttctgcacagctcaaaaggctgttgcggggtcatcattccacgccgctaacaaccgtggaggcgcccatcttctcggcgaagatctctaccagcacctgattgaatacctaaaggcccatctcgcccaagtccaggaggcgtcgcggcaacatgtcgacgaagctctcctccacttttacatcaaggagtggaatcggtacacgacggcggggcagtacaacaaccatctcttccgctacctgaaccgccattgggttaagcgtgaaatggacgagggcaagaagaatatctacgacatctacacgctgcatctggtgcgatggaaggaagacatgttcacagggagccaggaaagcgtcatgcgctcagtcctcaagctggtggagaagcagcgcaacggcgagacgatcgagcagtcacagataaagtcggtcgtcgactctttcgtttcgctcggtctggacgaggctgacagctccaaatctaccctcgacgtatataaggagttcttcgagaagcccttcctagaggcaaccgcacaatactacgataacgaatctaagcagttcttggccgaaaacagcgtagtcgaatacatgaagaaggccgagcttcgtctggacgaggagaaggagcgcgttcctctgtatctgctcaacgagatcatgtccccattgatgcgaacatgcgaacagtccctcatcacgaaccactcacaagcccttcgggaggagttccagatactacttgaccacgataaggaggaggatcttggtcgtatgtacaagttgcttgcccgtattcctgagggccttgaccctctgcgtcttcgattcgaaaaccatgtccgcaaggctggcttggctgccgtagataaaattgctcaagacggcgagaacattgaacccaaggtgtacgttgaggctctccttgaggttcacacccagtaccaggcacttgtcaacaaggccttcaacggagagtccgagttcgtacgttctttggacaacgcgtgccgcgagtttgtaaacaggaacaagatctgcaagtcgggctccaacaagtcccccgagctactcgcaaagtacaccgacacgctgctgaagcgttccaacgcgaagatgagcgaggaggatgacatggagaagctcctcacacagatcatgaccgtattcaagtacatcgaagacaaggatgtgttccagaagttctactcacgtatgttggccaagcgtctcgtccagactacttctgcttcagatgatgccgagacgagtatgatctcgaagctcaaggaagcctgtggatttgaatacaccaacaagcttcaacgcatgttccaagatatgcaaatatcaaaggatcttaacacagcattcaaggagtggcagtctaacaacctggacgagtcggacctgaagaccaacgttgatgcgtcgtaccacatccttggtaccggtttctggccgcttaacccacccactacaccctttacgcccccacaactcattgtccagacctatgatcgtttctcacgcttctacaaccacaagcatcagggtcgtaagcttacgtggttatggcaactgtgcaagggtgaagtcaaagccaactactgcaaggttgcaaacttgaagacttcacctaccttccaggtgtccacgtatcagatggctatcatgttgctgttcaacgatagtgacactgtcacctatgatgagattgccgaggctaccaagctcaataaggagacgcttgatcctagcctgggtgtcttcatcaaggccaaggttttgctcctacagcccgagaacgccaagcacgagtccggcaccacctacaagcttaacactggtttcaagaccaagaaggtcaagatgaacctgaacattggtatcaagtctgagcaaaaggccgaggcggaagacacgcacaagacgattgaggaggaccgcaagcttctgattcagtctgccattgtccgcatcatgaagtcccgcaagaagatgaagcaccaacagctcgtctccgaaacgatccaacagatcaagaaccgcttcatgccgcgcgtccccgacatcaagaagtgcatagatattctcctcgagaaggagtacctggagcgtctagaggctgatgaactcggctacctggcataa

SEQ ID NO: 13696 - protein, 769 aa, Pyrenophora tritici-repentis Pt-1C-BFP
MASTMPPVPAKDDVHATWKYLEAGVDKIMTNLRAGVDMKTYMGLYTAIHNFCTAQKAVAGSSFHAANNRGGAHLLGEDLYQHLIEYLKAHLAQVQEASRQHVDEALLHFYIKEWNRYTTAGQYNNHLFRYLNRHWVKREMDEGKKNIYDIYTLHLVRWKEDMFTGSQESVMRSVLKLVEKQRNGETIEQSQIKSVVDSFVSLGLDEADSSKSTLDVYKEFFEKPFLEATAQYYDNESKQFLAENSVVEYMKKAELRLDEEKERVPLYLLNEIMSPLMRTCEQSLITNHSQALREEFQILLDHDKEEDLGRMYKLLARIPEGLDPLRLRFENHVRKAGLAAVDKIAQDGENIEPKVYVEALLEVHTQYQALVNKAFNGESEFVRSLDNACREFVNRNKICKSGSNKSPELLAKYTDTLLKRSNAKMSEEDDMEKLLTQIMTVFKYIEDKDVFQKFYSRMLAKRLVQTTSASDDAETSMISKLKEACGFEYTNKLQRMFQDMQISKDLNTAFKEWQSNNLDESDLKTNVDASYHILGTGFWPLNPPTTPFTPPQLIVQTYDRFSRFYNHKHQGRKLTWLWQLCKGEVKANYCKVANLKTSPTFQVSTYQMAIMLLFNDSDTVTYDEIAEATKLNKETLDPSLGVFIKAKVLLLQPENAKHESGTTYKLNTGFKTKKVKMNLNIGIKSEQKAEAEDTHKTIEEDRKLLIQSAIVRIMKSRKKMKHQQLVSETIQQIKNRFMPRVPDIKKCIDILLEKEYLERLEADELGYLA

SEQ ID NO: 13697 - DNA, 2454 bp, Pyrenophora tritici-repentis Pt-1C-BFP
  CDS (1)..(2454)
atgagcgcagccgacatgtatcattttccaagcaagagggcggatctggccaaccagggcgatgtggtggacattacctcgagccccgacaacagccccgcgaaggcgaacggtcaacgtaacgcaatgcgcaaaacagcgccgaatatgcacgccaatagcggtcccaagcgattagtggtcaagaattttaggcctacaagaaaggtagaccctagggtcttcctggatcagacatggcagaagatcgagaaggcactggataccatcttccagcagggcgatatcgatttcagtcttgaggagctgtatagaggcgtagaaaacgtctgtcgtcagaatatggcaaaggatgtcaaggagcgacttatcatcaaatgtagagactacgttggaggtaacttgaaagccaaggtcaaggaaagcctgggcaggaccaacgtcgatgtgctgcgggcgacgctgcaggcttgggtgacatggaacagccagatgaaataccttgactggatcttctgctatctcgaccgcgcctacctgctcccacgtcacgaatccctacgcgagatctcggtcggcctctttcgcgtcataatcttcgaacatgacaagctaaatcctcgtatcatcgacggcgcctgtgaccttgtcgcatctgaccgagcaagcagcgatcttgatggtgacatattctccaagactatcaagatgttccacgacatgcaggtctacacacggcactttgaaccgcgtttgatggaagtcagtcaggaattcatcgtgaaatgggctgacgcggcgagttccgagaagtctttgcctgattacgttcgtagtgcaaaggcgcttatggaccgcgagttgaaaagagtagagatgtttagccttcccaacacaaccaagcgagaactccttacactgctcgaagaccatctgatatcaaagaaggagtcgagactgacaaaccaagatgacctcgctgacctccttgagactaatgccattgaagaccttggattgctgtataaaatgctccaaaggcggaagctgggctcacatctgcggtcaggtttcaccaaatggatcgaagatgaaggaacggctatcgtctttaacgagaaagagcaagagaacatggtgacccaactcctgtccctgaaacgccagctagacacactgtggaaaacatctttccatcgggatgaagagcttggtcacggcttgcgagaatcctttgacaggtttatgaacaagacaaagaagacatcagcaagctggggtacagataattccaagactggcgagatgatcgccaaatacgtcgacatgttattgagaggcggcgcgaaagcaataccggcgcagcttagtcgcaaagcagagaagcccgctgcggtagagggcgaggatgataaagaagatggcgtgtttgacgaagacacggaagtcaacggtcaactagaccaagtgctcgatctattccgctttttacacggcaaagccgtctttgaagctttctacaagaaggatttggcgagacgacttctaatgggaaggagtgcgagtgcagatgctgaaagaagcatgttgtcaaggttgaagatcgaatgcggtgctgggttcactgccaacctcgagcaaatgtttcgtgacatcgagctttcgcgggaagaaatgagttcatacaagaacatcagcgaagagcgcaacgagaaattaggccttgatctgaacgtcaacgtcctctctgcatcagcctggccaacgtaccctactgttccagtcatcctacctccacaaatccagactgcaatcagcaagtttgaagcacattacaagatcaagcactctggtcgcaaactcgagttcaagcacgcacttgcgcattgtcaactcaaagcaaagttccccaagggactgaaagagctggtcgtttcttcgtttcaggccatcgttcttttgctcttcaacggtcgtgaagatgacgagcacattgactacgactaccttaagcaagccacaggactaccagccacggccgagctcaaccgtactctacaatcgctcgcttgcgcgaaagtacgacccctgacaaagcaccccaaaggtcgagagatcaacgaaaccgataccttcacactcaacacttccttcaccgaccctaaataccgcatcaaagtcaacactgtccagctcaaagagacagcggcagagaacaaggaaacacacgagcgtgttgctgccgaccgtaattatgaaactcaagccgccattgtccgaatcttgaaggcgaggaagaggatcagccatgcggaattagtcagtgagacaataaaggcgacaaagaatcgaggcacattggaagtcagcggcatcaaaagaaacattgatcggctgattgaaaaggagtttttggagagggaggacgatggtttgtatgcttatattgcttag

SEQ ID NO: 13698 - protein, 817 aa, Pyrenophora tritici-repentis Pt-1C-BFP
MSAADMYHFPSKRADLANQGDVVDITSSPDNSPAKANGQRNAMRKTAPNMHANSGPKRLVVKNFRPTRKVDPRVFLDQTWQKIEKALDTIFQQGDIDFSLEELYRGVENVCRQNMAKDVKERLIIKCRDYVGGNLKAKVKESLGRTNVDVLRATLQAWVTWNSQMKYLDWIFCYLDRAYLLPRHESLREISVGLFRVIIFEHDKLNPRIIDGACDLVASDRASSDLDGDIFSKTIKMFHDMQVYTRHFEPRLMEVSQEFIVKWADAASSEKSLPDYVRSAKALMDRELKRVEMFSLPNTTKRELLTLLEDHLISKKESRLTNQDDLADLLETNAIEDLGLLYKMLQRRKLGSHLRSGFTKWIEDEGTAIVFNEKEQENMVTQLLSLKRQLDTLWKTSFHRDEELGHGLRESFDRFMNKTKKTSASWGTDNSKTGEMIAKYVDMLLRGGAKAIPAQLSRKAEKPAAVEGEDDKEDGVFDEDTEVNGQLDQVLDLFRFLHGKAVFEAFYKKDLARRLLMGRSASADAERSMLSRLKIECGAGFTANLEQMFRDIELSREEMSSYKNISEERNEKLGLDLNVNVLSASAWPTYPTVPVILPPQIQTAISKFEAHYKIKHSGRKLEFKHALAHCQLKAKFPKGLKELVVSSFQAIVLLLFNGREDDEHIDYDYLKQATGLPATAELNRTLQSLACAKVRPLTKHPKGREINETDTFTLNTSFTDPKYRIKVNTVQLKETAAENKETHERVAADRNYETQAAIVRILKARKRISHAELVSETIKATKNRGTLEVSGIKRNIDRLIEKEFLEREDDGLYAYIA

SEQ ID NO: 13699 - DNA, 2244 bp, Acyrthosiphon pisum
  CDS (1)..(2244)
atggcagatacaaaaaggtctaatttaacggcattgaatggtctgtcattaaatgcatcattaaaatccaatcctacaaaaaagctagtagtgaaaaatctcagaaagaaaccgatgttacctgacaattatcaggaacaaacatggaagaagttacgcgaggctgttattgccatacaaacttcaactgctattcaatataccatggaagagttgtatcaagctgtagaaaatatgtgcaacaataatttggctgcagcattgtataataaccttattgagcttagtgaaacacatgtaaaaaaactattattgaattttactgaagtaacaaatgataaaatcatatttttaaaaaaagtaaaccatcattggtcatcacactgtgaacaaatgttaatgatacgcagtatatttctatttttggaccgaacttatgtacttcaaaatcctaatgttaactccatttgggacatgggcttgaatttattccgtcatcatatcatgttaaacactaatgttcaaaatcgagcagttgatggtttgcttctactcatagaaaaagaaagacaaggtgatatggtagataaaacattgctaaaatcattgcttagaatgctctctgatttaaaaatttatcaagatgcttttgaaggaaagttcctacaagccactgaacgtctttatgcaactgaaggtttacgattaatgcttgagcttgaagtttccgaatatttgtatcatgttgagaagcgtttaaatgaagaaaatgaacgtctcattcattatttagatacatctacaaagtggtcacttatacatactgttgaaaaacaattgataagcgaacacgttagctccatattacaaaaaggattggaacaattgctcaatgagaatagactggacgatttaaagttaatgtacagcctgttgacacgtgtaaaaaaaggactttcagagctctgtataaactttaattcttacataaaaaaatatgggcgaactattgttatagacccagaaaaggataaaacaatggtgcaggaattattagatttcaaagacaaaatggatgttattgttaaaaaatgtttccaagcaaatgagaaatttggtaacagtttaaaagaagcatttgaaaattttgttaaccaacgaacaaataaacctgctgagcttattgccaaatttgttgactctaaacttaaagttggaaataaagaatctacagaagaagagctagagaaactcttagataaaattatggttctgtttcggttcattcatggcaaagatgtttttgaagctttttacaaaaaagatttagctaaaagattgttgcttgggaaatctgcgagcgtggatgctgaaaaaagtatgctgtccaaattaaaacaagaatgtggtggagggtttacatccaaacttgagggcatgtttaaagatatggagattagtaaagatataaatgtggcttacaaacagtatttggcacatgttaaagatattcaactctctgttattgacatgaccgtcaatatattgactatggggcactggccaacttatgtcgtaacagaagtggccatgcccaacgaaattattgaataccaagactgttttaataagttttacctagccaaacacaatggaagaaaattacagtggcagccaactctaggtcattgtgtattgcgttctcagttcaagcagggtaataaagagttacaggttagcttgttccaagcaatggtgctgttgttgtttaacgaatatcaaactctcccttttaaagaaataaaaactgcgaccaacatggaagatactgagttgaggagaacactgcagtcgttggcatgtggtaaagcaagagtgttgataaaggtgcccaaaggacgggaaataggtgatattgatcagttttccatcaacaatgatttttgtaataagttatatagaattaaaatcaatcaagtgcagatgaaagaaacaaatgaagagcagaaggcaactgaagaacgagtctatcaggatagacagtaccaaatggatgcagctattgtgaggataatgaaaatgcgcaagtcactcatgcataatcttttgatcagtgaactgttcaatcagctcaagtttcctgccaagccagctgatttaaagaaacgcatagagtctcttattgaccgagactatatggaaagagacaaagataatcctaatcaatataattatattgcataa

SEQ ID NO: 13700 - protein, 747 aa, Acyrthosiphon pisum
MADTKRSNLTALNGLSLNASLKSNPTKKLVVKNLRKKPMLPDNYQEQTWKKLREAVIAIQTSTAIQYTMEELYQAVENMCNNNLAAALYNNLIELSETHVKKLLLNFTEVTNDKIIFLKKVNHHWSSHCEQMLMIRSIFLFLDRTYVLQNPNVNSIWDMGLNLFRHHIMLNTNVQNRAVDGLLLLIEKERQGDMVDKTLLKSLLRMLSDLKIYQDAFEGKFLQATERLYATEGLRLMLELEVSEYLYHVEKRLNEENERLIHYLDTSTKWSLIHTVEKQLISEHVSSILQKGLEQLLNENRLDDLKLMYSLLTRVKKGLSELCINFNSYIKKYGRTIVIDPEKDKTMVQELLDFKDKMDVIVKKCFQANEKFGNSLKEAFENFVNQRTNKPAELIAKFVDSKLKVGNKESTEEELEKLLDKIMVLFRFIHGKDVFEAFYKKDLAKRLLLGKSASVDAEKSMLSKLKQECGGGFTSKLEGMFKDMEISKDINVAYKQYLAHVKDIQLSVIDMTVNILTMGHWPTYVVTEVAMPNEIIEYQDCFNKFYLAKHNGRKLQWQPTLGHCVLRSQFKQGNKELQVSLFQAMVLLLFNEYQTLPFKEIKTATNMEDTELRRTLQSLACGKARVLIKVPKGREIGDIDQFSINNDFCNKLYRIKINQVQMKETNEEQKATEERVYQDRQYQMDAAIVRIMKMRKSLMHNLLISELFNQLKFPAKPADLKKRIESLIDRDYMERDKDNPNQYNYIA

SEQ ID NO: 13701 - DNA, 2295 bp, Acyrthosiphon pisum
  CDS (1)..(2295)
atgaacggtgtaccaaagaaacgcaccaacttgcgcatcaaagctttcccgatgtcaatggatgataaattaattgataatatttgggtgttattgaaaaatgctattcaagaaattcaaaagaaaaacaattctggtctaagttttgaagaactgtaccgaaatgcctataccatggtattgctgaaacatggtgagaaattgtatactggcatgaaggaagctgtaataaaccatttagaaaataaggtcagagaagatgttcttaaggcattaaataacaattttttacaagttttaaatgttgcttggaatgaccatcaaacttctatggtgatgatacgtgacatattgatgtacatggaccgagtttatgttaaacataatgaagttgacaatgtttataatttgggtctcgttttgtttcgtgatctaattgttcgctatgggtatattcgtgatcatcttcggatgactctgttgaatttgataaaacttgaaagaaaaggtgaagtagttgatcgaatagccattaaaaatgcatgtcaaatgttaatgattcttggaattactgggcgcattgtttatgaagaagattttgaaaaaccgtttttggaacaatctgctgaattttataaaatggaaagtcaaaagtttttagatgaaaacagtgcatgtatttatattagaaaagttgaatctagaattatagaagaatcagatcgagcaaaacattacctagatgattcaactgaaagtcgaattgttgaggttattgaagtagaactaatcaaaagaaacatgaaaataattgttgagatggaaaattctggtgttgtatacatgttgaagaacaacaaaattgacgatttagcatgcatgtacaagttattatctcgcgttcctgaaggtttaaaaaccatgtctgatagtgttagtttgtatttacgggaattaggaaaatcacttgttcaaggagaagatattaatactaacgcagtcaactatattcagagtttgttggatctcaaagatagatttgatttttttttggttcattcgtttaacaatgataagatgtttaaacaaatgattgctgctgattttgaatattttttcaacatcaattctaagtcaccagaatatctatctttatttgttgatgagaaattgaaaaagggagtgcgtgggttaactgaaaatgacgtagaggtagtcttggacaaagccatggttattttccgctttcttcaagaaaaagatgtatttgaaaggtattataaacagcatttagccaagagattacttttaaataaatctgtcagcaatgacaatgaaaaaaatatgatctctaaactcaagactgagtgtggctgtcaattcacttcaaaactggaaggtatgtttaaagatatgtccgtatctaacactatcatggaagaatttaaggaatacgctgcgaagtctaataatccgtttttacatgccgtggatcttactgtgagagtattaaccacggggttttggcctacccatgcattatcaaaatgcaatgtgccgttggttcctaggagtgcttttgcagaatatcgaaatttttatctggggaaacataacggtcgacaactaacattgcaaccacaacttgggtcagctgatttgaatgctgtattctacggttcaagacgaccagacaatgaattattgacaactgtatctatttcagctaattctctcagctcatctagcgtgcgaagacacataattcaagtgtcgacttatcagatgtgtattcttttaatgttcaatactcatgaaaaattaacttttgaagacatacgaagtgaaactgatattcctgacaaagatttgattagagcattacaatctttagcattaggaaaaccctcacagcgtatacttttgaagactcctaaatgtaaagaaatagaattaactcatgaattctgtgttaatgagttatttacatcgaaattgcatagagtgaaaatccaaacagtcgcagctaaaggggaaactgaaccagaaagaaaagaaactagaagcaaggtagatgaggaccgtaagcatgaaattgaagctgcaattgtacgcgttatgaaatcacggaaaaaattgattcataatactctagtgttggaagtcgtagaacaactcaaagtcagattcttaccttctccggttattatcaaaaaaagaattgaaggactaattgaaagagaataccttgcaagatcaacagaagataggaaaacttatctttatgttgcataa

SEQ ID NO: 13702 - protein, 764 aa, Acyrthosiphon pisum
MNGVPKKRTNLRIKAFPMSMDDKLIDNIWVLLKNAIQEIQKKNNSGLSFEELYRNAYTMVLLKHGEKLYTGMKEAVINHLENKVREDVLKALNNNFLQVLNVAWNDHQTSMVMIRDILMYMDRVYVKHNEVDNVYNLGLVLFRDLIVRYGYIRDHLRMTLLNLIKLERKGEVVDRIAIKNACQMLMILGITGRIVYEEDFEKPFLEQSAEFYKMESQKFLDENSACIYIRKVESRIIEESDRAKHYLDDSTESRIVEVIEVELIKRNMKIIVEMENSGVVYMLKNNKIDDLACMYKLLSRVPEGLKTMSDSVSLYLRELGKSLVQGEDINTNAVNYIQSLLDLKDRFDFFLVHSFNNDKMFKQMIAADFEYFFNINSKSPEYLSLFVDEKLKKGVRGLTENDVEVVLDKAMVIFRFLQEKDVFERYYKQHLAKRLLLNKSVSNDNEKNMISKLKTECGCQFTSKLEGMFKDMSVSNTIMEEFKEYAAKSNNPFLHAVDLTVRVLTTGFWPTHALSKCNVPLVPRSAFAEYRNFYLGKHNGRQLTLQPQLGSADLNAVFYGSRRPDNELLTTVSISANSLSSSSVRRHIIQVSTYQMCILLMFNTHEKLTFEDIRSETDIPDKDLIRALQSLALGKPSQRILLKTPKCKEIELTHEFCVNELFTSKLHRVKIQTVAAKGETEPERKETRSKVDEDRKHEIEAAIVRVMKSRKKLIHNTLVLEVVEQLKVRFLPSPVIIKKRIEGLIEREYLARSTEDRKTYLYVA

SEQ ID NO: 13703 - DNA, 2328 bp, Acyrthosiphon pisum
  CDS (1)..(2328)
atgtcaaaccggcgcgacggtatgtcgtcgaaacaaatctatgatcttgacaccatatggggagatttgaagaacggaattgagcatgtgtacaaccgccaatcgatgcccaagcccaggtacatggagctatatactcacgtttacaattactgtaccagtgtgcatttaaatcccaataaaagtgcatccgtaacgagtagtcgttccaaaaaagcatcatcgacgtctacagcacaggtcggtggtgctcagttagtgggcctagagttataccgtaggattaaggagttcttgaggcactacctggtggacttgatcagccgtggtgctaattttatggacgaagatgtgctgtctttctatacccgtgagtgggaagactacaggtttagttcaaaagtattgaatggtgtttgttcatatctaaatcgacattgggtacgcagggaatgcgaagaaggccgtaaaggtatttatgaaatatatcaacttgcattagtggcatggcgagactgcctgtttcagcaactacataaacgtgtcaccaatgctgtcctaaaattgattgaacgcgaacgaaatggtgaatcaatcaacacacgtctggttagtggtgtaattaactgttatgttgagcttggcttaaacgaagaagagccaaccctaaaaggtcaaagtttgacaatttataaagaatcttttgaaaaaacatttttagaagaaactaaatgtttttatattaaagagagtgatcaatttttgtccaataatacagtaaccgagtatatgaaaaaggcagagcaacgtttacaagaagaacaaaaacgagtgcgggattatctacatgaaactacattggttggtcttgcagatacttgtgaaagagtgctgattagaaaacacatggaaattttccatgctgaattccaaaatttattaaattttgaaaagaacgatgatctcggtcgaatgtaccaattagtctcacgtatacaagatggtcttggcgagttgaaaaatatactagaatgtcatatattggcacagggtcaaactgctatcgaaaaatgtggtgaaatggcttttaatgacccaaaaacctacgtcagtgttatcctaaatgtacataaaaaatacaatgcactggttgccgtatcatttaataatgattcaggatttgttgctgctttggacaaggcctgtggaggattcattaataacaacttagtcacaagacaatacaactcaagttctaaaagtccagagatgttggccaaattttgtgatctgctgttgaaaaaatctagtaagaacccagaagaagccgaactcgaagatacattaaaccaagtaatgattatgtttaaatacattgaagataaagatgtgttccaaaagttctacagtaaaatgcttgccaaacgactcgttcaacatatgtctgccagtgacgatgcagaagcctcaatgatatctaaactgaaacaagcctgtgggttcgagtacacttcaaaacttcaacgtatgttccaagacattggtgtgtccaaagatcttaacgaggcttttagaaagcacgtagctaattcaaacatgcctcatgatattgactttagcatacaagttttatcatcgggttcatggcccttccagtatcttcttacattttcactgccgtccgaattggaacgttccgttcaaaggtttacccaattctacagtgcccagcattcaggtcgtaaactcaactggctgtataatatgtccaaaggtgaattggttactaactgtttcaaaaatcggtatacgttacaagcctccacttttcaaatggccgttttattgcaatttaatgttcaagagtcgtggacagttaaccaactgtcagaatcaacacagctgaaaaccgactatttgatacaggtcgtacagatattgttgaaagcaaaactcctgacatgcaatgaagatgaggcaaatgtggaaggtaattcccttgtaaagctttttctcgggtacaagaacaagaagttgcgcgtgaacatcaacgtcccgatgaaacaagaaataaaattagaacaagagagtacacacaagcatatcgaggaagacaggaaaatgctgatacaagctgctattgtgagaatcatgaaaatgcggaaagtcatgaagcaccaacagctgacggccgaggtcttaacacaactgtcgtcgagatttaagcctagagtcaacgtcataaaaaagtgtatagacatcctgatcgaaaaagagtacctagagagaaccgagggacagaaagattcgtatagttacttggcttaa

SEQ ID NO: 13704 - protein, 775 aa, Acyrthosiphon pisum
MSNRRDGMSSKQIYDLDTIWGDLKNGIEHVYNRQSMPKPRYMELYTHVYNYCTSVHLNPNKSASVTSSRSKKASSTSTAQVGGAQLVGLELYRRIKEFLRHYLVDLISRGANFMDEDVLSFYTREWEDYRFSSKVLNGVCSYLNRHWVRRECEEGRKGIYEIYQLALVAWRDCLFQQLHKRVTNAVLKLIERERNGESINTRLVSGVINCYVELGLNEEEPTLKGQSLTIYKESFEKTFLEETKCFYIKESDQFLSNNTVTEYMKKAEQRLQEEQKRVRDYLHETTLVGLADTCERVLIRKHMEIFHAEFQNLLNFEKNDDLGRMYQLVSRIQDGLGELKNILECHILAQGQTAIEKCGEMAFNDPKTYVSVILNVHKKYNALVAVSFNNDSGFVAALDKACGGFINNNLVTRQYNSSSKSPEMLAKFCDLLLKKSSKNPEEAELEDTLNQVMIMFKYIEDKDVFQKFYSKMLAKRLVQHMSASDDAEASMISKLKQACGFEYTSKLQRMFQDIGVSKDLNEAFRKHVANSNMPHDIDFSIQVLSSGSWPFQYLLTFSLPSELERSVQRFTQFYSAQHSGRKLNWLYNMSKGELVTNCFKNRYTLQASTFQMAVLLQFNVQESWTVNQLSESTQLKTDYLIQVVQILLKAKLLTCNEDEANVEGNSLVKLFLGYKNKKLRVNINVPMKQEIKLEQESTHKHIEEDRKMLIQAAIVRIMKMRKVMKHQQLTAEVLTQLSSRFKPRVNVIKKCIDILIEKEYLERTEGQKDSYSYLA

SEQ ID NO: 13705 - DNA, 2466 bp, Drosophila ananassae
  CDS (1)..(2466)
atgagtgctgcaaagaagtataagcccatggatactactgagctgaacgagaatactgagaacattaccgcctgcttgaagaaagtggaaaacgcagccgctgccgccgccgcctcgaccctgggacgcagcgccttcgccgcccagaacatgaactcggccgcatcaacgaatggcgagcgcctaccaaacttctccaagcttggcggccaccatggggagattcgaacagcatcaactacctcaaacctccttaatcgcatgggagccattcacaacagcaagccaggcgatgttaagaaaatagttattaagaactttaaggctaagcctacactgcccgataactactccgaggacacatatgtgaaactcgaggaagcggttattgccattcaactgtcgaagcccatcaaatattcgctggaggaactctaccaagccgtggtgaacatgtgtagccacaagatggatgcccagttgtatgcgaagctcaaggaattgacagaacagcatgtgaagcgcaatattaagataaaggaactaactggcggcagcttggacaagctggtattgctggaaaagattaatcactggtggctttcgttttgtcagcaaatgatcatgatccgtagcattttcctttacatggatcggacctatgtgctgcagaactcctccatccactctatctgggacatggggctggacctcttccgcattcactttgctcagaacaatgtcgtccaaaagcggactgtcgacggtctgctcaccttaatagagaaggagcgccagggctcgaccgtagaccgcggtcttctgaagagtctggtgcgcatgctatgcgacttacagatctataccagttcgttcgaagagaagttcctcgacgccaccaatcagctctacaaggcagaaagccaacggaagatgcaggagttggaagtgcccgagtacttgcagcacgtcaataaacggctggccgaggagaacgaacggttgttgcactatttggactcgagcacaaaacatcccctgatatacaacgtggagaaggagttgttggcggagcatctgacaaccattttgcaaaagggcttggactctttgctggaggataacagactgaacgacctcacactgttatacgggcttctaagccgggtcaaaaacggcacatccgaactctgtggcaactttaacggatacataaagaaaaaaggtcgcaccattgtcatcgaccctgaaaaggataagagcatggtccaagatctgctcgatttcaaagataaaatggacatcatcgttcgcaactgcttcgagcacaatgaaaagttcacaaactcgttgcgcgaggcattcgagttctttatcaatcagcgggccaacaagccggccgaacttattgcgaaatacgttgacatgaaacttcggtccggcaacaagggcaccaccgacgaggagctggaaaagactttggacaagatcatggttctgtttcgtttcatacatggcaaggatgtgtttgaagctttctacaaaaaggatttggccaaacgtttgctggtgggaaaatctgcttccgtcgactctgaaaagagtatgctgtccaaactgaagcaggagtgtggaggaggattcacttcaaagctggaaggcatgttcaaagatatggagctgagtagggatatcaacattgcgttccgcggacatgcgttgagcaacaatcgcgacgtccacaacctggacttgtccgtcagcattctgaccatgggctattggccaacatatgcgcccacagaagtcaccatgccgccacagtttatcaatccccagcagatcttcaacaagttctatctggaaaagcatagcggtcgcaagctgcagtggcagccaacgctgggcaattgcatgctaagggcgcagtttgatgcgggtccaaaagagttgatggtgtcactgtttcaagctctggtccttcttctgttcaacgacaagacagctttaagctacgaggagattttggccgccaccagcattgaggatggagagctccgtcggacactgcagtcactggcgtgtggtcgtgcccgcgtcattacgaaaacaccgaagggtcgggacatcgaagatggtgatcaattcgactttaacgatgagtttacaaacaagttgttccgaattaagattaaccaaatccagatgaaggaaacgaacgaggagcaaaaggcaacggaggagcgcgttttccaagatcgtcagtatcaaatcgatgctgccattgtgcgcattatgaaaatgcgcaaaacgctgagccacaacctactcatcaccgaactgttcaaccagctgaccttccctgttaagcctgctgacttaaagaaacgtatcgagtcgcttattgatcgagactacatggagcgggataaggataatcaaaatcaatacaactatgtggcataa

SEQ ID NO: 13706 - protein, 821 aa, Drosophila ananassae
MSAAKKYKPMDTTELNENTENITACLKKVENAAAAAAASTLGRSAFAAQNMNSAASTNGERLPNFSKLGGHHGEIRTASTTSNLLNRMGAIHNSKPGDVKKIVIKNFKAKPTLPDNYSEDTYVKLEEAVIAIQLSKPIKYSLEELYQAVVNMCSHKMDAQLYAKLKELTEQHVKRNIKIKELTGGSLDKLVLLEKINHWWLSFCQQMIMIRSIFLYMDRTYVLQNSSIHSIWDMGLDLFRIHFAQNNVVQKRTVDGLLTLIEKERQGSTVDRGLLKSLVRMLCDLQIYTSSFEEKFLDATNQLYKAESQRKMQELEVPEYLQHVNKRLAEENERLLHYLDSSTKHPLIYNVEKELLAEHLTTILQKGLDSLLEDNRLNDLTLLYGLLSRVKNGTSELCGNFNGYIKKKGRTIVIDPEKDKSMVQDLLDFKDKMDIIVRNCFEHNEKFTNSLREAFEFFINQRANKPAELIAKYVDMKLRSGNKGTTDEELEKTLDKIMVLFRFIHGKDVFEAFYKKDLAKRLLVGKSASVDSEKSMLSKLKQECGGGFTSKLEGMFKDMELSRDINIAFRGHALSNNRDVHNLDLSVSILTMGYWPTYAPTEVTMPPQFINPQQIFNKFYLEKHSGRKLQWQPTLGNCMLRAQFDAGPKELMVSLFQALVLLLFNDKTALSYEEILAATSIEDGELRRTLQSLACGRARVITKTPKGRDIEDGDQFDFNDEFTNKLFRIKINQIQMKETNEEQKATEERVFQDRQYQIDAAIVRIMKMRKTLSHNLLITELFNQLTFPVKPADLKKRIESLIDRDYMERDKDNQNQYNYVA

SEQ ID NO: 13707 - DNA, 2625 bp, Drosophila ananassae
  CDS (1)..(2625)
atgaatctgcggggaaatcctccaaagaaggagggcaaaatgcgcatacgcgcttttccgcagcaacaacatcgtctaccaccttctgggacggctgctctccagcggcgctcgcatcaccatcataccgccagatctggtcgaaatgcagttccagttgctgcaccgataaccacatcagctgccgtacccgcacccgcttccaataacactgaagctaccagtactacaactaccacatcagatgtcaccggtaccgataataataacaataacgatgcatcaccagcaataccagaaactggggccctcggctgccgctatccactctggctgcccgagtataagcgcaaagcttttaatgcctcaatggatgaaaagtacgtggaaacaatttgggccagccttaagaatgccatccaggaaattcagaagaaaaacaactcaggattgtcgttcgaacagctatatcgtaatgcctacaacatggtgttgcacaaacatggcaaccgactctactatggccttcgggaggttgtctccgagcatctggagcacaaggtgcgaacggaggtactggagagcctgcacagtaatttcctgcccaagttgaatcaagcctggaccgatcaccagacctcgatggtaatgatccgcgacatactcatgtacatggaccgagtttatgtgcagcagcgagaggtggacaatgtatacaatctgggattgattctgtttagagatcaggttgttcgcttttcggaaatccagaaggcattgcgagagaaactgcttggcatggtgatggaggagcggcatggcgaggccattaaccatttggcgatcaagaatgcttgcagtatgctaattaccttgggcatcaactcgcgcacagtttatgaggaggactttgagaagccattcctcgcccagtcggcggcgttctataaattcgagtctcagaactttcttgccgagaacaacgctggcgtttacatcaagaaagtagaggcacgcatcacggaggagtcctcgcgagcggcactctatttggacaaggacacagaaccacgcattgtgcgtgtcgtagaagaggaactgatcaagaagcatatgcgtcccattgttgaaatggagaattcgggcgttgtgtatatgataaagaattcaaagaccgaggacctggcctgcacatacaagctcttctcgagactgaaagaggagggcctcaaagtgatagcagataccatgtcggcgtatctgcgcgaacaaggacgcatgctggtcaaggaggaggagaacggaaacacaaaccccatcacgttcgtgcagaacctactggatcttaaggatcgctttgatcagtttctggtgcactcattcagcaatgatcgcatatttaaaaacgtcatctcatctgattttgaacatttcctcaatctgaataacaaatctcccgaatatttgtcactattcattgacgacaaactgaaaaagggcggcaaaggaatgagcgagcaggagattgaatccattttggataaaacaatggtgctcttccgtttcctattggagaaagatgtctttgagcgctattataagacgcatttagccaagcgattgttgctaaataaatcagtctcagacgatttcgaaaagaacatgatatccaaactaaagactgaatgcggctgtcaatttacctcgaagctagagggcatgtttaaagacatgtctgtctccaatacgatcatggacgagtttaaaaactttgtaaataataacaatttatctctgggcggtgtggagcttacggtacgcatactaacaactggattttggcccacccagacggcaactcccaactgcaacatacccgccgcaccccgcgaagcctttgatatattcaaaaacttctatttaaataagcactcaggtcgtcagctgacgctacagcctcagatgggcactgcttatattaacgctgttttttatggccgcaaagcagcagacactgaaaaggataaggatgctccgagctccagctctagcggctgtgctgtgcctaccaccacccgcaagcatattctgcaagtgtccacataccaaatgtgcgttctgcttctatttaacaatcgagatgtgctaacctacgatgacatccaccaggagacggacataccggaaagagagctagtccgagctctccaatctctttcaatgggcaagccagcgcagcgactgctagtccggaactcaaaaacgaaaaccaaggatattgagcccacggatgagttctatgtgaacgatgcctttgtatccaaattccacagggttaagattcaaactgtggcagccaagggtgaatcggagccagagcgcaaggagacgcgtggaaaggtcgacgaggatcgtaagcacgagattgaagcagctattgtacgcatcatgaaggcgcgtaagcgtatggctcacaacctactggtttcggacgtgacgtcgcagttgaagtcgcgcttcttgccgtcacctgtgtttatcaagaagcgaatcgagggcctcatcgagcgcgaatatctgcaacgatcgcccgaggatcgaaaggtgtataattatttggcttaa

SEQ ID NO: 13708 - protein, 874 aa, Drosophila ananassae
MNLRGNPPKKEGKMRIRAFPQQQHRLPPSGTAALQRRSHHHHTARSGRNAVPVAAPITTSAAVPAPASNNTEATSTTTTTSDVTGTDNNNNNDASPAIPETGALGCRYPLWLPEYKRKAFNASMDEKYVETIWASLKNAIQEIQKKNNSGLSFEQLYRNAYNMVLHKHGNRLYYGLREVVSEHLEHKVRTEVLESLHSNFLPKLNQAWTDHQTSMVMIRDILMYMDRVYVQQREVDNVYNLGLILFRDQVVRFSEIQKALREKLLGMVMEERHGEAINHLAIKNACSMLITLGINSRTVYEEDFEKPFLAQSAAFYKFESQNFLAENNAGVYIKKVEARITEESSRAALYLDKDTEPRIVRVVEEELIKKHMRPIVEMENSGVVYMIKNSKTEDLACTYKLFSRLKEEGLKVIADTMSAYLREQGRMLVKEEENGNTNPITFVQNLLDLKDRFDQFLVHSFSNDRIFKNVISSDFEHFLNLNNKSPEYLSLFIDDKLKKGGKGMSEQEIESILDKTMVLFRFLLEKDVFERYYKTHLAKRLLLNKSVSDDFEKNMISKLKTECGCQFTSKLEGMFKDMSVSNTIMDEFKNFVNNNNLSLGGVELTVRILTTGFWPTQTATPNCNIPAAPREAFDIFKNFYLNKHSGRQLTLQPQMGTAYINAVFYGRKAADTEKDKDAPSSSSSGCAVPTTTRKHILQVSTYQMCVLLLFNNRDVLTYDDIHQETDIPERELVRALQSLSMGKPAQRLLVRNSKTKTKDIEPTDEFYVNDAFVSKFHRVKIQTVAAKGESEPERKETRGKVDEDRKHEIEAAIVRIMKARKRMAHNLLVSDVTSQLKSRFLPSPVFIKKRIEGLIEREYLQRSPEDRKVYNYLA

SEQ ID NO: 13709 - DNA, 2466 bp, Drosophila erecta
  CDS (1)..(2466)
atgagtgcggccaagaagtacaagcccatggacacaactgagctgcacgagaacacagagaacatcgccgcctgcctgaagaaggccgagaacgtcgcccccaccgctgccgccgcctcgagcctgggccgcagtgccttcgctgcccaaaacatgaattctgcgtcaaccaacggcgagcgcctgccaaacttttccaagctgggcggcagccatggcgaaatccgcacggcttcaactacctcaaatctcctcaatcgcgtgggggctattcacaacagcaagcccggcgatgtcaagaagatagtgattaagaattttaaggataagcccacactgcccgataactactccaaggatacgtacgtgaagcttgaagaagccgtaatcgccatccaactctccaagcccattaaatattcgctggaggagctctaccaggcggtggtgaacatgtgcagccacaagatggatgcgcaattgtacgcgaaactcaaggagttaacagagcaacacgtaaagcgcaatattaagctcaaggagcttaccggcggcagcatggacaaactgattttgctggaaaagattaaccactggtggctctcgttctgccaacaaatgatcatgattcgcagcatattcttgtatatggatcgaacttatgtgctgcagaattcgtccattcactctatttgggacatggggctggacctttttcgcatccattttgctcaaaacagcgttgtccaaaagcgaaccgtcgacggtttactaacgcttattgaaaaagaacgacaaggctctaccgtggaccgcggtttgctgaagagtttggttcgcatgttatgcgacctgcaaatctacaccagctcctttgaggagaagttcctcgacgcaaccaaccaattgtataaggctgagagtcaacgcaagatgcaggaactagaggttcctgagtacttacagcacgtcaacaagcgtttggcagaagagaacgaacgtttgcgtcactatctagactcaagcaccaaacatccgctgatttacaatgtggaaaaggagttactcgccgaacacctaacgtcaatattgcagaagggcttggattcattgttagaagacaacagactgagcgatctcacgcttttgtacgggctgcttagtcgagtgaaaaatggaacatctgagctgtgcggcaacttcaatggtttcattaagaaaaaaggacgcaccattgtcattgatcccgagaaggataagagcatggtccaagatttgcttgatttcaaggataaaatggatgtgattgttcgcacctgctttgagcacaatgagaaattcacaaactcgttgcgcgaggcctttgagttctttatcaaccaacgtgccaacaagccggccgagctcattgctaaatacgtagatatgaaactgcgatcaggcaacaagggaaccacggatgaggagttggaaaagactctagataaaatcatggttctatttcgttttatacatggcaaagatgtctttgaagcgttttacaagaaggacttagccaaacgattacttgtgggcaaatcggcatcagtggactccgaaaagagcatgctgtcaaagcttaagcaggagtgcggtggtggttttacgtccaagctggagggcatgtttaaggacatggaactgagccgagatatcaacattgcgttccgcggacacgcattaagcaacaaccgcgatgtccacaacttggacttgtgcgtcagcattctgaccatggggtactggcctacatatgcgcctacagaggtcacaatgccgccacagttcattaatccgcagcagatttttaacaagttttatctagaaaagcatagcgggcgaaagttgcagtggcagcctacattagggaattgtatgctgcgtgctcagttcgatgcgggtccgaaagaattgttggtctcgctgtttcaagcccttgttcttctattgtttaatgataagccagttctaagctacgaggagatattggccgccaccctaatcgaggatggagagttacgtagaacacttcagtccctggcttgtggacgcgcccgcgtcataacaaaaacaccgaaaggccgcgaaattttggatggcgatcagttcgactttaacaatgagttcacaaacaaattgtttagaatcaagatcaaccaaatacagatgaaagagacaaatgaggagcaaaaggcgacggaggagcgtgtatttcaggatcgccagtatcaaattgatgcggctattgtgcgcattatgaaaatgcggaaaacgctcagccataatcttctcatcaccgagctgttcaaccagcttaccttccccgtcaagcccgctgaccttaaaaagcgaatcgagtcgctcatcgaccgcgactacatggagcgggacaaggataatcaaaaccaatacaactatgtggcataa

SEQ ID NO: 13710 - protein, 821 aa, Drosophila erecta
MSAAKKYKPMDTTELHENTENIAACLKKAENVAPTAAAASSLGRSAFAAQNMNSASTNGERLPNFSKLGGSHGEIRTASTTSNLLNRVGAIHNSKPGDVKKIVIKNFKDKPTLPDNYSKDTYVKLEEAVIAIQLSKPIKYSLEELYQAVVNMCSHKMDAQLYAKLKELTEQHVKRNIKLKELTGGSMDKLILLEKINHWWLSFCQQMIMIRSIFLYMDRTYVLQNSSIHSIWDMGLDLFRIHFAQNSVVQKRTVDGLLTLIEKERQGSTVDRGLLKSLVRMLCDLQIYTSSFEEKFLDATNQLYKAESQRKMQELEVPEYLQHVNKRLAEENERLRHYLDSSTKHPLIYNVEKELLAEHLTSILQKGLDSLLEDNRLSDLTLLYGLLSRVKNGTSELCGNFNGFIKKKGRTIVIDPEKDKSMVQDLLDFKDKMDVIVRTCFEHNEKFTNSLREAFEFFINQRANKPAELIAKYVDMKLRSGNKGTTDEELEKTLDKIMVLFRFIHGKDVFEAFYKKDLAKRLLVGKSASVDSEKSMLSKLKQECGGGFTSKLEGMFKDMELSRDINIAFRGHALSNNRDVHNLDLCVSILTMGYWPTYAPTEVTMPPQFINPQQIFNKFYLEKHSGRKLQWQPTLGNCMLRAQFDAGPKELLVSLFQALVLLLFNDKPVLSYEEILAATLIEDGELRRTLQSLACGRARVITKTPKGREILDGDQFDFNNEFTNKLFRIKINQIQMKETNEEQKATEERVFQDRQYQIDAAIVRIMKMRKTLSHNLLITELFNQLTFPVKPADLKKRIESLIDRDYMERDKDNQNQYNYVA

SEQ ID NO: 13711 - DNA, 2481 bp, Drosophila grimshawi
  CDS (1)..(2481)
atgagtgctgctaagaaatataggcctatggatacgactgaactaaacgacactgagaatattgccgcctgtttgaaaaagggtgacagcagcaatccaataacgacgacgacgacgacaacagcaacaacaacaaaccgaagcgccttcgccgcccaaaatatgaattcggcagcgtccacaaatggcgaacgattgccaaatttttcgatgctgggaccgcatcatggcaatgatatacgtgcggcatcaactacctcaaatcttcttaatcgcatgggagccatacacaacaccaagccgggtgatgttaaaaagattgttattaagaacttcaaggctaaacccacactgcccgataactattctgaggacacttacgtgaagctggaagaggccgttctcgccatccaattgtccaagcccattaaatattccctggaagagctctaccaggccgttgtgaatatgtgcagccataaaatggatgcacaattatatgccaaacttaaggagctgacggaacagcacgttaaacgtaatatcaaactgaaggagctcactggtggcagcatggacaaactagtattgctggaaaaaatcaacaattggtggttatcattctgccagcaaatgatcatgatacgtagtatatttttatatatggatcgcacctatgtgctgcaaaattcacttatacactcgatatgggacatggggctggacctctttcgcatacactttgcccagaacagcgttgtacagaagcgcactgtggacggcctgcttacgctcatcgagaaggaacgccagggcgcaaccgtggatcgtggtttgcttaagagcttggtgcgtatgctgtgtgacctgcagatatatagcagcgcatttgaggagaagttccttgatgcaactaatcaactgtacaaggctgagagtcaacgcaaaatgcaggagttggaggtgcccgagtacttacagcatgtgagcaaacgcctcgccgaggagaatgagcgtctcttgcattatctagactccagcacaaaacatcctttaatatataatgtggaaaaggaactgcttgccgaacatttaacgacaattctgcaaaagggccttgactcacttctagaggacaacagactgaacgatctaacccttttgtatggcctgcttagtcgcgtcaaaaacggcacttccgagctctgcggcaatttcaatggttacatcaagaaaaagggacgcaccattgtcatcgatcccgagaaggacaagagtatggtgcaagatctgctggacttcaaggacaaaatggatgtcattgtgcgtaattgctttgagcacaatgagaaattcacaaattcgctgcgcgaagccttcgaattcttcattaatcagcgcgccaacaaaccggctgaactaattgctaaatatgtggatatgaaattgcgctcaggcaacaagggcaccaccgacgaggagctggaaaagacgttggataagatcatggttctgtttcgttttatacatggcaaggacgtctttgaagcattctacaaaaaggatctggccaagcgtttgctcgtgggcaaatctgcctcggtggactcggagaagagcatgttgtcgaaattgaaacaggaatgcggtggcggtttcacatctaaactggagggcatgttcaaggatatggaactgagtcgtgatgtcaatttggcatttcgaggtcatgcgcttagcaacgatcgtgatgtgaccaatctggatttaaccgtcagcatactgaccatgggctattggccaacatacacgcccaccgaggtcacaatgccgccccaatttatcaatccccaacaaatattcaacaagttctatctggagaaacacagcgggcgaaagctacaatggcagccaacactgggcaattgcgtattgcgtgcaagtttcgatgcgggtcccaaagagctgttggtgtcactcttccaaggactcgtgctgctgttgttcaacgacaaaccgatgttgagctacgaggagatattggctgccaccagcattgaggatggtgagctgcgacgcactctgcagtcgctggcctgcggacgtgcgcgtgtcatcaccaagacaccgaagggacgcgacattgaggataaggatcaatttgatttcaataatgagttcatcaataaattgtttcgcatcaaaattaatcaaatacaaatgaaggaaacgaatgaggagcagaaggcgacggaggaacgtgtttttcaggatcgtcagtatcaaattgatgcggccattgtgcgcattatgaaaatgcgtaaaacgcttagccacaatttgctcatcaccgagttgttcaaccagctaacgtttcccgttaaacctgctgatctgaaaaagcgcatcgagtcactgatcgatcgggattatatggagcgggacaaggataatcaaaatcaatacaactatgtggcataa

SEQ ID NO: 13712 - protein, 826 aa, Drosophila grimshawi
MSAAKKYRPMDTTELNDTENIAACLKKGDSSNPITTTTTTTATTTNRSAFAAQNMNSAASTNGERLPNFSMLGPHHGNDIRAASTTSNLLNRMGAIHNTKPGDVKKIVIKNFKAKPTLPDNYSEDTYVKLEEAVLAIQLSKPIKYSLEELYQAVVNMCSHKMDAQLYAKLKELTEQHVKRNIKLKELTGGSMDKLVLLEKINNWWLSFCQQMIMIRSIFLYMDRTYVLQNSLIHSIWDMGLDLFRIHFAQNSVVQKRTVDGLLTLIEKERQGATVDRGLLKSLVRMLCDLQIYSSAFEEKFLDATNQLYKAESQRKMQELEVPEYLQHVSKRLAEENERLLHYLDSSTKHPLIYNVEKELLAEHLTTILQKGLDSLLEDNRLNDLTLLYGLLSRVKNGTSELCGNFNGYIKKKGRTIVIDPEKDKSMVQDLLDFKDKMDVIVRNCFEHNEKFTNSLREAFEFFINQRANKPAELIAKYVDMKLRSGNKGTTDEELEKTLDKIMVLFRFIHGKDVFEAFYKKDLAKRLLVGKSASVDSEKSMLSKLKQECGGGFTSKLEGMFKDMELSRDVNLAFRGHALSNDRDVTNLDLTVSILTMGYWPTYTPTEVTMPPQFINPQQIFNKFYLEKHSGRKLQWQPTLGNCVLRASFDAGPKELLVSLFQGLVLLLFNDKPMLSYEEILAATSIEDGELRRTLQSLACGRARVITKTPKGRDIEDKDQFDFNNEFINKLFRIKINQIQMKETNEEQKATEERVFQDRQYQIDAAIVRIMKMRKTLSHNLLITELFNQLTFPVKPADLKKRIESLIDRDYMERDKDNQNQYNYVA

SEQ ID NO: 13713 - DNA, 2469 bp, Drosophila mojavensis
  CDS (1)..(2469)
atgagtgcagcaaagaaatacaagctcatggatacgactgaactgcacgacaccgagaatattgcctcctgcctgaagaagggggacaacggcagcagcaacgcaacgactgggagcaaccttggccgtagcgccttcgctgcccaaaatatgaattcagcagcgtccacaaacggcgaacgattgccaaatttttcgaaattgggctcgcatcatggcagcgatatgcgttcggcatcaactacctcaaatctgcttaatcggatgggcgccatacacaacaccaagccgggtgatgtcaaaaagatagttattaagaactttaaggctaaacccacactgcccgataactattcagaggacacttatgtgaaacttgaggaggccgttatcgctattcaattatcaaagcccatcaaatattcactggaggagctctaccaggccgttgtaaatatgtgcagtcataaaatggatgcacagctatatataaaactgatggagctaaccgagcagcacgtcaaaagaaacatcaaacttaaagagctaactggcggaagtatggataaactggttttgctggaaaagatcaacaattggtggctatcgttttgtcagcaaatgatcatgatacgtagcatatttctatatatggatcggacttatgtgctgcaaaattcgtccatacactctatttgggacatggggctggacctctttcgcatacactttgcccagaatagcgtcgtgcagaaacgcaccgttgatggtttactgacgctgatcgaaaaggaacgccagggctcaacagtcgatcgtggattgctcaagagtttagtgcgtatgctgtgcgatctgcagatatatagcagtgcgtttgaggaaaagttcctggatgcgaccaatcaactgtacaaggctgagagtcaacgaaagatgcaggaattggaggtgcccgagtacttacagcatgtgagcaagcgactggccgaggagaatgagcgtctgttgcactatctggactccagcacaaaacatcctttaatatacaatgtggaaaaggaactgcttgccgaacacttaacaaccattctgcaaaagggccttgactcccttctagaggacaacagactgaacgatctaacccttttgtatggcctgcttagtcgcgtcaaaaacggcacttccgagctatgcggcaactttaatggttacatcaagaaaaaaggacgcactattgtcattgatccagagaaggataagagtatggtgcaagatctgttggacttcaaggataaaatggatgttattgtgcgcacttgctttgagcacaatgagaaattcacaaattcgttgcgagaggccttcgaattcttcatcaatcagcgcgccaacaagcccgctgagcttattgctaaatatgtggatatgaaattgcgctctggcaacaagggcaccaccgacgaggagctggaaaagaccttggacaagataatggtcctgtttcgttttatacacggcaaggacgtttttgaagcattctacaaaaaggatttggccaaacgcttgctggtgggcaaatcagcctcggttgattccgagaagagtatgttgtcgaaattgaaacaggaatgcggcggcggctttacatcgaagctggagggcatgttcaaggatatggaattaagtcgtgatgtgaatttggctttccgcggtcatacgcttagcaatgatcgggatgtaaccaatctggacttgacagtcagcatcctaaccatgggctattggccaacatatgcgcccactgaggtcacaatgccaccacagtttatcaatccccagcagatattcaacaagttctatctggagaaacacagcgggcgaaaacttcaatggcagcctactctaggcaattgcgtattgcgggcacatttcgatgcgggtcccaaggagctgatggtgtcgctgtttcaagcgctcgttctgctgctgtttaacgacaagcctacgctcagctacgaggagatcttggctgccaccaacattgaggatggtgaactgcgacgcacactgcagtcactagcatgcggacgtgcgcgtgtcattaccaaaacgccgaaaggccgcgacattgaggatcgggatcaatttgattttaataatgagttcgttaacaaattgttccgcatcaagattaatcaaattcaaatgaaggaaacgaacgaggagcaaaaggcgacggaggagcgcgttttccaggatcgccagtatcagatcgatgcggctattgtgcgcattatgaaaatgcgtaagacactgagccacaatttgctcatcaccgagttgttcaaccagctaacctttcccgttaagcctgctgatctgaaaaagcgcattgagtcgctgattgatcgtgattatatggagcgagacaaggataatcaaaatcaatataattatgtggcataa

SEQ ID NO: 13714 - protein, 822 aa, Drosophila mojavensis
MSAAKKYKLMDTTELHDTENIASCLKKGDNGSSNATTGSNLGRSAFAAQNMNSAASTNGERLPNFSKLGSHHGSDMRSASTTSNLLNRMGAIHNTKPGDVKKIVIKNFKAKPTLPDNYSEDTYVKLEEAVIAIQLSKPIKYSLEELYQAVVNMCSHKMDAQLYIKLMELTEQHVKRNIKLKELTGGSMDKLVLLEKINNWWLSFCQQMIMIRSIFLYMDRTYVLQNSSIHSIWDMGLDLFRIHFAQNSVVQKRTVDGLLTLIEKERQGSTVDRGLLKSLVRMLCDLQIYSSAFEEKFLDATNQLYKAESQRKMQELEVPEYLQHVSKRLAEENERLLHYLDSSTKHPLIYNVEKELLAEHLTTILQKGLDSLLEDNRLNDLTLLYGLLSRVKNGTSELCGNFNGYIKKKGRTIVIDPEKDKSMVQDLLDFKDKMDVIVRTCFEHNEKFTNSLREAFEFFINQRANKPAELIAKYVDMKLRSGNKGTTDEELEKTLDKIMVLFRFIHGKDVFEAFYKKDLAKRLLVGKSASVDSEKSMLSKLKQECGGGFTSKLEGMFKDMELSRDVNLAFRGHTLSNDRDVTNLDLTVSILTMGYWPTYAPTEVTMPPQFINPQQIFNKFYLEKHSGRKLQWQPTLGNCVLRAHFDAGPKELMVSLFQALVLLLFNDKPTLSYEEILAATNIEDGELRRTLQSLACGRARVITKTPKGRDIEDRDQFDFNNEFVNKLFRIKINQIQMKETNEEQKATEERVFQDRQYQIDAAIVRIMKMRKTLSHNLLITELFNQLTFPVKPADLKKRIESLIDRDYMERDKDNQNQYNYVA

SEQ ID NO: 13715 - DNA, 2451 bp, Drosophila persimilis
  CDS (1)..(2451)
atgagtgctgctaaaaagtataagcctatggataccacagagctgcacgagaacaccgagaatattgctgcttgcctgaaaaaggctgaaagtgccgccgccttattgatgggccgcagtgcctttgctgcccaaaacatgaactcatcgtccacaaacggcgaacgcctgccaaatttctccaagcttggttcgaaccatggcgagattcgatcggcatcaactacctcaaacttacttaatcgcacgggggccatccacaacagcaagcctggcgatgtcaaaaagatagtgattaagaacttcaaagataaacccacactgcccgataactattccgaggacacgtatgtgaagctcgaggaggccgttatcgccatacaactgtcgaagcccattaaatattcactggaggagctctaccaggccgttgtgaatatgtgcagtcataaaatggacgcccagctgtatacgaagctcaaggagctgaccgagcaacatgtgaaacgcaatatcaagctgaaggagctcactgggggcagcatggacaagctggtgctgctggagaaaatcaataactggtggctctcgttctgccagcagatgatcatgatacgcagcatattcttgtacatggatcgcacctatgttttacaaaactcatttatccactcaatatgggacatggggctggacctctttcgcatacactttgctcagaatagcgtcgtccagaagcgtacggtcgatggtctcttgacgctgattgaaaaagaacgacagggcgcgtctgtggaccgcggtctgctcaagagtttggtacggatgctgtgcgatcttcagatctactccagttcgtttgaggagaagttcctcgatgccaccaatcaactgtacaaggctgagagtcaacgtatgatgcaggacctggaggtgcccggctacctgcagcacgttagcatgcgcctggccgaggaacatgagcgcttgctgcactatctggactcgagcacaaagcatccgcttatatacaatgtagagaaggagctgctggccgaacacctgacggccatactgcaaaagggtctggactcgttgctggaggacaacagatgggtcgaactaacaatgctatacggtctgcttagccgtgtcaaaaacggcacatcagagctgtgcggaaactttaacggatacattaagaaaaagggacgcaccattgtcattgacccggaaaaggataagagcatggtgcaggatctgcttgaatttaaagataaaatggattacattgtccgcaattgctttgcacgcaatgaaaagttcacgaattcgttgcgcgaggcctttgagttctttatcaatcagcgagccaataaaccagcagaacttattgcaaaatacgtggacatgaagctacggtctggcaacaagggcaccaccgatgaagagcttgagaagacattggacaagatcatggtcctgtttcgctttatacacggcaaggatgtctttgaggctttttacaagaaggatctggcaaagcgattgcttgtgggcaagtcggcttccgtggactcggaaaagagtatgctgtcaaaactgaaacaagaatgtggcggaggcttcacgtcgaagctggagggcatgtttaaggacatggaactgagccgcgacatcaatacagcgttccgcggtcacgctctcagcaacaatcgcgatgtccataacctggacctgtgcgtcagtatactgacaatgggctactggccaacatatgcgcccacagaggtcacaatgccgccacagctcatcaatccacagcagatattcaacaagttttatttggaaaagcatagcggacgaaagctacaatggcagcccacgctgggcaactgcatgctccgtgcgcagtttgaggcgggtccaaaagagcttttggtttcgctgtttcaggctctggtgctgctcttgttcaacgataagccggtgcttagctacgaggagatattggccgcaaccatgatcgagggtggagagttgcgccgaacactccagtcgctggcctgtggacgcgcccgagtcataacgaaaacaccaaaaggtcgcgagatcgaggatggcgaccagtttgattttaataacgagttcacaaacaaactgtttagaatcaaaatcaatcagatacagatgaaagagacgaatgaggaacaaaaggcgaccgaggagcgtgtattccaggaccgtcaataccagatagatgcggccattgtgcgcatcatgaagatgcgtaaaacgttaagccacaatctactcatcaccgagctgttcaatcagctaaccttccccgtcaagcccgctgatttaaagaaacgcattgagtcgctcatcgatcgagactacatggagcgcgacaaggataatcagaaccagtataactacgtggcataa

SEQ ID NO: 13716 - protein, 816 aa, Drosophila persimilis
MSAAKKYKPMDTTELHENTENIAACLKKAESAAALLMGRSAFAAQNMNSSSTNGERLPNFSKLGSNHGEIRSASTTSNLLNRTGAIHNSKPGDVKKIVIKNFKDKPTLPDNYSEDTYVKLEEAVIAIQLSKPIKYSLEELYQAVVNMCSHKMDAQLYTKLKELTEQHVKRNIKLKELTGGSMDKLVLLEKINNWWLSFCQQMIMIRSIFLYMDRTYVLQNSFIHSIWDMGLDLFRIHFAQNSVVQKRTVDGLLTLIEKERQGASVDRGLLKSLVRMLCDLQIYSSSFEEKFLDATNQLYKAESQRMMQDLEVPGYLQHVSMRLAEEHERLLHYLDSSTKHPLIYNVEKELLAEHLTAILQKGLDSLLEDNRWVELTMLYGLLSRVKNGTSELCGNFNGYIKKKGRTIVIDPEKDKSMVQDLLEFKDKMDYIVRNCFARNEKFTNSLREAFEFFINQRANKPAELIAKYVDMKLRSGNKGTTDEELEKTLDKIMVLFRFIHGKDVFEAFYKKDLAKRLLVGKSASVDSEKSMLSKLKQECGGGFTSKLEGMFKDMELSRDINTAFRGHALSNNRDVHNLDLCVSILTMGYWPTYAPTEVTMPPQLINPQQIFNKFYLEKHSGRKLQWQPTLGNCMLRAQFEAGPKELLVSLFQALVLLLFNDKPVLSYEEILAATMIEGGELRRTLQSLACGRARVITKTPKGREIEDGDQFDFNNEFTNKLFRIKINQIQMKETNEEQKATEERVFQDRQYQIDAAIVRIMKMRKTLSHNLLITELFNQLTFPVKPADLKKRIESLIDRDYMERDKDNQNQYNYVA

SEQ ID NO: 13717 - DNA, 2466 bp, Drosophila virilis
  CDS (1)..(2466)
atgagtgctgcaaagaaatacaagcctatggatacgactgaactgcacgacaccgagaacattgcctcctgtctaaaaaagggcgacagcagcagcaacccaataacgacgacgaaccttggccgcagcgccttcgccgcccaaaatatgaattcagcagcgtccacaaatggcgaaagattgccaaacttttcgaaactgggtccgcatcatggcaacgatatacgttcagcatcaactacctcaaatctgcttaaccgcatgggcgcgattcacaacaccaagccgggtgatgtcaagaagatagttattaagaactttaaggctaaacccacactgcccgataactattctgaggacacttatgtgaaactggaggaggccgttatcgccatacaactatccaagcccatcaaatattcactggaggaactctaccaggccgttgtaaatatgtgcagtcataaaatggatgcacaattgtatgtcaaactaatggaactaaccgagcagcacgtcaaacgtaacatcaagcttaaggaactaactggcggcagcatggacaagctagtcttgctggaaaaaatcaacaattggtggctatcgttttgccagcaaatgataatgatacgtagcatatttctatatatggatcgcacctatgtgctacaaaattcgtccatacactctatatgggacatggggctggacctctttcgcatccactttgcccagaacagcctcgttcagaaacgcaccgtagatggtctgttggcactgatcgaaaaggagcggcagggctcaacagtggatcgtggactgctcaagagtttggtgcgtatgctgtgtgatctgcagatatatagcagtgcgttcgaggagaagtttcttgatgcgaccaaccaactgtacaaggctgagagtcaacgaaaaatgcaggagttggaagtccccgagtacttacagcatgtgagcaaacgtctagcggaggagaatgagcgtctgttgcactatctagactccagcacaaaacatcctttaatatacaatgtggaaaaggaactgcttgccgaacacttaacaacaattctgcaaaagggccttgactccctgctagaggacaacagactgaacgatctaacccttttgtatggcctacttagtcgtgtcaaaaacggcacatccgagctttgcggcaattttaatggttacatcaagaaaaagggacgcactattgtcattgatcccgagaaggataaaagtatggtacaagatctgctcgactttaaagataaaatggatgtaatagtgcgcaactgctttgaacacaatgagaaattcacgaattcgttgcgagaggccttcgaattcttcatcaatcagcgcgccaacaagcccgcggaactcattgcaaaatatgtggacatgaaattgcgctctggcaacaagggtaccaccgatgaggagctggaaaagaccttggataagatcatggttctgtttcgttttatacacggcaaggacgtctttgaagcattctacaaaaaggatttggccaaacgcttgctggtaggaaaatccgcttcagtggactcagagaagagtatgctatcaaaattgaaacaggaatgcggcggcggttttacatccaagctggagggcatgttcaaggacatggaattgagtcgtgatgtcaatttagcttttcgcggtcatacgcttagcaatgatcgtgatgtaaccaatctagacctaaccgtcagcatactaactatgggctactggccaacgtacgcgcccactgaagtcacaatgccgccgcaatttatcaatccccagcagatattcaacaagttctatctggaaaagcacagcgggagaaaactacaatggcagccaacactgggcaattgcgtgttgcgtgcacactttgatgcgggtcccaaagagctgatggtgtcgttgtttcaagcgttggtgctgctgttgttcaatgataagccaacgctgagctacgaggagatattggctgccaccagcattgaggacggcgagttgcgacgcacactgcaatcgttggcctgtggacgtgcgcgtgtcattaccaaaacgcccaaaggtcgcgacattgaggatcgggatcagtttgatttcaataatgagttcatcaacaaactgttccgcatcaaaatcaatcaaatacaaatgaaggaaacgaatgaggagcaaaaggcgacggaggagcgcgttttccaggatcgtcaatatcaaattgatgcagccattgttcgcattatgaaaatgcgtaaaacactgagccacaatttgctcatcaccgaattgttcaaccagctaacgtttcccgttaagcctgctgatctgaaaaagcgcatcgagtcactgatcgatcgtgattatatggagcgggacaaggataatcaaaatcaatacaactatgtggcataa

SEQ ID NO: 13718 - protein, 821 aa, Drosophila virilis
MSAAKKYKPMDTTELHDTENIASCLKKGDSSSNPITTTNLGRSAFAAQNMNSAASTNGERLPNFSKLGPHHGNDIRSASTTSNLLNRMGAIHNTKPGDVKKIVIKNFKAKPTLPDNYSEDTYVKLEEAVIAIQLSKPIKYSLEELYQAVVNMCSHKMDAQLYVKLMELTEQHVKRNIKLKELTGGSMDKLVLLEKINNWWLSFCQQMIMIRSIFLYMDRTYVLQNSSIHSIWDMGLDLFRIHFAQNSLVQKRTVDGLLALIEKERQGSTVDRGLLKSLVRMLCDLQIYSSAFEEKFLDATNQLYKAESQRKMQELEVPEYLQHVSKRLAEENERLLHYLDSSTKHPLIYNVEKELLAEHLTTILQKGLDSLLEDNRLNDLTLLYGLLSRVKNGTSELCGNFNGYIKKKGRTIVIDPEKDKSMVQDLLDFKDKMDVIVRNCFEHNEKFTNSLREAFEFFINQRANKPAELIAKYVDMKLRSGNKGTTDEELEKTLDKIMVLFRFIHGKDVFEAFYKKDLAKRLLVGKSASVDSEKSMLSKLKQECGGGFTSKLEGMFKDMELSRDVNLAFRGHTLSNDRDVTNLDLTVSILTMGYWPTYAPTEVTMPPQFINPQQIFNKFYLEKHSGRKLQWQPTLGNCVLRAHFDAGPKELMVSLFQALVLLLFNDKPTLSYEEILAATSIEDGELRRTLQSLACGRARVITKTPKGRDIEDRDQFDFNNEFINKLFRIKINQIQMKETNEEQKATEERVFQDRQYQIDAAIVRIMKMRKTLSHNLLITELFNQLTFPVKPADLKKRIESLIDRDYMERDKDNQNQYNYVA

SEQ ID NO: 13719 - DNA, 2328 bp, Drosophila willistoni
  CDS (1)..(2328)
atgaatataaggggcaatcctcccaagaaggagggcaaaatgcgcatacgggccttcccggcctctatggatgagaaatatgtggagaccatatgggccagtttaaaaaatgccatacaagagatacaaaagaaaaacaattctggcctatcgttcgagcaactatatcgtaatgcctataatatggtcctacataagcatggaaatcgcttatattatggcctacgtgaggttgtctctgaacacttggaacataaagttcgtcaagaggttttagagagtttgcatagcaatttcttacccaaattgaatcaagcctggacagatcatcaaacatcaatggttatgatcagagatattctgatgtatatggatcgtgtctatgttcaacagcgtgaagtggataatgtttataatttgggtttaatactctttagagatcaggtggtacgcttctcggaaattcaaaaggctttgcgtgagaaactcttgggcatggtcatggaggagcgtcacggtgaggcgattaatcatttggccattaagaacgcatgcactatgctcattacacttggcatcaattcccggactgtatatgaagaggatttcgagaaaccgtttctctctcaatcggctgcattctataaatttgaatcacaaaactttcttgccgagaataacgctggcgtttacatcaagaaagtggaggctcgcatcaccgaggaatcatcgcgggcggccctatatttggacaaggataccgaaccgcgaattgttcgtgttgttgaggaggaattaattaagaaacatatgcgtaccatagtcgaaatggaaaattctggtgttgtctatatgatcaagaattcgaaaactgaagatctagcatgcacatacaaattgttctcaagattaaaagaggaaggccttaaggtgatagccgacacaatgtcggcatatttacgagaacaaggacgcatgctggttaaagaggaggagaatggcaacacaaatcccataacatttgtgcaaaatctattagatctcaaagatcgtttcgatcaatttctagtgcattcgtttagcaatgatcgcatctttaagaatgtcatctcatcggattttgaacattttctcaatttaaataacaaatcaccagagtatttatcgctctttattgatgataaactgaaaaagggtggcaagggaatgagcgaacaggaaattgaaaccatattggataagacaatggtgttattccgtttcctactggagaaggatgtgttcgaacgttattataagacgcatttggccaaacgattgctgctcaataaatcagtctcagatgattttgaaaagaacatgatatccaaactaaagactgaatgtggctgtcaatttacctcaaaactagagggcatgttcaaggatatgtccgtgtccaatactataatggatgagttcaagggttttgtaaataataataatttatctttgggcggtgtggaactaacagttcgcatcttaactactggcttttggcccacacagacagcaactcccaattgcaatataccatcagcgccgcgtgaagcctttgagatctttaagaatttctatttaaataaacattcaggccgtcaattgacgttacaaccgcaaatgggtactgcctacataaatgccgtattttatggccgtaaaacagcaaacgaaagcgagaaagacaaagatgcccccagctctagttcaagcggtggtactactgggccaacaacaacgcggaagcatatattgcaagtctcaacttatcagatgtgtgttttgctgctcttcaataatcgcgatatactcacttatgatgacatacaccaagaaacagatatacccgaacgtgaactggttagagcattacaatcgctatcaatgggcaaaccagcgcaacgtttattagttagaaattcaaagacgaaaacaaaagatattgaaccaacagatgagttctatgtgaacgatgcgtttgtctccaaattccatagggtaaaaatccaaacagttgcggctaaaggtgaatcagaacccgagcgcaaagagaccagaggcaaggtcgatgaggatcgtaagcatgaaattgaagcggcaattgtacgaataatgaaggcacgcaaacgtatggcgcacaatttactggtatcggatgtaacatcacaattgaagtctcgtttcttgccatcgcctgtgttcattaagaagcgcattgaaggtcttattgagcgtgaatatctgcaacgatcggctgaggatcgcaaagtttataactatttggcttaa

SEQ ID NO: 13720 - protein, 775 aa, Drosophila willistoni
MNIRGNPPKKEGKMRIRAFPASMDEKYVETIWASLKNAIQEIQKKNNSGLSFEQLYRNAYNMVLHKHGNRLYYGLREVVSEHLEHKVRQEVLESLHSNFLPKLNQAWTDHQTSMVMIRDILMYMDRVYVQQREVDNVYNLGLILFRDQVVRFSEIQKALREKLLGMVMEERHGEAINHLAIKNACTMLITLGINSRTVYEEDFEKPFLSQSAAFYKFESQNFLAENNAGVYIKKVEARITEESSRAALYLDKDTEPRIVRVVEEELIKKHMRTIVEMENSGVVYMIKNSKTEDLACTYKLFSRLKEEGLKVIADTMSAYLREQGRMLVKEEENGNTNPITFVQNLLDLKDRFDQFLVHSFSNDRIFKNVISSDFEHFLNLNNKSPEYLSLFIDDKLKKGGKGMSEQEIETILDKTMVLFRFLLEKDVFERYYKTHLAKRLLLNKSVSDDFEKNMISKLKTECGCQFTSKLEGMFKDMSVSNTIMDEFKGFVNNNNLSLGGVELTVRILTTGFWPTQTATPNCNIPSAPREAFEIFKNFYLNKHSGRQLTLQPQMGTAYINAVFYGRKTANESEKDKDAPSSSSSGGTTGPTTTRKHILQVSTYQMCVLLLFNNRDILTYDDIHQETDIPERELVRALQSLSMGKPAQRLLVRNSKTKTKDIEPTDEFYVNDAFVSKFHRVKIQTVAAKGESEPERKETRGKVDEDRKHEIEAAIVRIMKARKRMAHNLLVSDVTSQLKSRFLPSPVFIKKRIEGLIEREYLQRSAEDRKVYNYLA

SEQ ID NO: 13721 - DNA, 2466 bp, Drosophila willistoni
  CDS (1)..(2466)
atgagtgctgccaagaagtataagcccgtggacactacagagctgcatgaaaacagtgaaaacattgcagcttgtctgaaaaaggccgaaaacgaaaacgtttccactgctacctcccctttaagtttgggacgaagtgcatttgccgcacaaaatatgaattcctccgcatcgactaacggcgagcgcttgccaaatttctccaagttgcatggcaatgaaatacgatcgtcttcaactacctcaaatctcttgaatcgcatgggagctattcataacagcaagccgggcgacgtcaagaagattgtgattaagaatttcaaggctaagcctatactgcccgataactattccgaagaaacttacgtgaaactggaggaagctgtcatcgccattcaactatcgaaacctattaaatattctctggaagagctctatcaagccgtcgtaaatatgtgtagtcataaaatggatgcccaattgtatgccaaactgaaggagctaactgaacagcacgtcaaacggaacatcaaactaaaagaactcactggcgggagcatggacaaattggtacttctggagaaaataaataactggtggctctcattctgccagcaaatgatcatgatacgtagcatatttttatacatggatcgcacctatgtcttgcaaaactcagcaatacactcgatctgggatatggggctcgacctttttcgcattcattttgctcagaatagtgttgtccagaagcgaactgtcgacggactgctcgctcttatcgagaaagagcggcaaggttccactgtggatcgcggtctcctgaaaagtttggttcgtatgttatgcgatctacagatttacacattgtccttcgaggaaaagtttttggatgcaaccaatcaactgtacaaggctgaaagtcaacgcaaaatgcaagaattggaggtgcccgaatatttgcaacatgttaataaacgtttatctgaggaaaatgaacggctactccattatctggactcaagcacaaagcatcctttaatatacaatgtggaaaaggagcttttggccgaacatttgaccacaatactgcaaaagggcttggattcactgctagaagacaatcgactgaatgatttaaccttgctgtatggcctgcttagcagggtaaaaaatggaacttccgaactttgcggaaactttaatggctacattaagaaaaagggccgcactattgttattgatcccgagaaggacaaaagtatggtgcaagatcttcttgattttaaggataaaatggatatcattgtccgcaattgttttgaccataatgaaaagtttacgaattctctgagggaagcattcgagttctttattaatcagcgggctaataaaccggccgaacttatagctaaatatgtggacatgaaactacgttcaggcaataagggtaccaccgatgaggaattggaaaaaacgctagacaaaattatggttttgttccgtttcattcacgggaaagatgtctttgaagcattttataaaaaagatttggcaaagcgtttgcttgtcggcaaatcggcatctgttgattcggagaaaagtatgctatcaaaactaaaacaagagtgtggcggtggatttacctctaaattggaaggcatgttcaaggatatggaactgagtagagatattaacacagcttttcgtggccatgctctaagcaataatcgagacgtccataatcttgatttgtgcgttagcatattgaccatgggtaattggcccacatatccacccacagaggtgaccatgccgcctcaattcattaacccgcagcagatattcaataagttttatttggagaagcacagcggcagaaaattgcagtggcagcccacacttggcaactgtatgctaagggcccagtttgatgcgggccccaaggagttaatggtatccctgtttcaggcattggttctgcttttgtttaatgataagcctacccttggatatgaggagattttggccgctaccagcattgaggatggtgaactaagacgaacattacagtccttggcctgcggacgggctcgggttataacaaaaacgcccaagggtcgggatattgaagatggggatcagtttgattttaacaacgagttcacaaacaaactgtttcgcatcaaaattaatcaaattcaaatgaaggagacgaacgaggagcaaaaggccactgaggaacgcgttttccaggatcggcaatatcaaatcgatgcggccattgtgcggatcatgaaaatgcgtaagacgctaagccacaacctgcttatcacagagctatttaatcagctaacttttcccgtcaagcctgctgatttaaagaaacgaatcgagtctcttatcgatcgggactacatggagcgggataaggataatcaaaatcaatacaactatgtggcctaa

SEQ ID NO: 13722 - protein, 821 aa, Drosophila willistoni
MSAAKKYKPVDTTELHENSENIAACLKKAENENVSTATSPLSLGRSAFAAQNMNSSASTNGERLPNFSKLHGNEIRSSSTTSNLLNRMGAIHNSKPGDVKKIVIKNFKAKPILPDNYSEETYVKLEEAVIAIQLSKPIKYSLEELYQAVVNMCSHKMDAQLYAKLKELTEQHVKRNIKLKELTGGSMDKLVLLEKINNWWLSFCQQMIMIRSIFLYMDRTYVLQNSAIHSIWDMGLDLFRIHFAQNSVVQKRTVDGLLALIEKERQGSTVDRGLLKSLVRMLCDLQIYTLSFEEKFLDATNQLYKAESQRKMQELEVPEYLQHVNKRLSEENERLLHYLDSSTKHPLIYNVEKELLAEHLTTILQKGLDSLLEDNRLNDLTLLYGLLSRVKNGTSELCGNFNGYIKKKGRTIVIDPEKDKSMVQDLLDFKDKMDIIVRNCFDHNEKFTNSLREAFEFFINQRANKPAELIAKYVDMKLRSGNKGTTDEELEKTLDKIMVLFRFIHGKDVFEAFYKKDLAKRLLVGKSASVDSEKSMLSKLKQECGGGFTSKLEGMFKDMELSRDINTAFRGHALSNNRDVHNLDLCVSILTMGNWPTYPPTEVTMPPQFINPQQIFNKFYLEKHSGRKLQWQPTLGNCMLRAQFDAGPKELMVSLFQALVLLLFNDKPTLGYEEILAATSIEDGELRRTLQSLACGRARVITKTPKGRDIEDGDQFDFNNEFTNKLFRIKINQIQMKETNEEQKATEERVFQDRQYQIDAAIVRIMKMRKTLSHNLLITELFNQLTFPVKPADLKKRIESLIDRDYMERDKDNQNQYNYVA

SEQ ID NO: 13723 - DNA, 2466 bp, Drosophila yakuba
  CDS (1)..(2466)
atgagtgcggccaagaaatacaagcccatggacacaactgagctgcacgagaacacagagaacatcgccgcctgcctgaagaaggccgagaacgttgcccccaccgctgccgccgcctcgagcctgggccgcagtgccttcgctgcccaaaacatgaattctgcgtccaccaacggcgagcgcctgccaaatttctccaagctgggcggcagccatggcgagatccgcacgccttcaactacctcaaatcttctcaatcgcatgggggctattcacaacagcaagcccggcgatgtcaagaagatagtgattaagaattttaaggataagcccacactgcccgataactactccaaggacacgtacgtgaagcttgaagaggccgttatcgccatccaactctccaagcccattaaatattcgctggaggagctctaccaggcggtagtgaatatgtgcagccacaagatggatgcgcaattatacgcgaaactcaaggagctaacagagcaacacgtaaagcgcaatattaagcttaaggagcttactggcggcagcatggacaaactgattttgctggaaaagatcaaccactggtggctctcgttctgccaacaaatgatcatgattcgcagcatattcttgtatatggatcgaacttatgtgctgcagaattcgtccattcactcgatttgggacatggggctggacctttttcgcattcatttcgcccaaaacagcgttgtccaaaagagaaccgtcgacggtatactaacgcttattgaaaaagaacgacaaggctccaccgtggaccgtggtttgctgaagagtttggttcgcatgttatgcgacctgcagatctacaccagctcctttgaggagaagttcctcgatgcaaccaaccaattgtataaggctgagagtcaacgcaagatgcaggaattagaggttcccgagtatttacagcatgttaacaagcgtttggccgaagagaacgagcgcttgcgtcactatctagactcgagcaccaagcatccgctgatttacaatgtggaaaaggagttactcgctgaacatctaacgtcaatattgcagaagggcttagattcattgttggaagacaacagactgagcgacctcacgctgttgtacgggctgcttagtcgagtcaaaaatggaacatctgaattgtgcggcaatttcaacggtttcattaagaaaaagggacgcaccattgtcatcgatcccgaaaaggataagagcatggtccaagatttgctcgatttcaaggataaaatggatgtgatagttcgcacttgctttgagcacaatgagaaattcacaaactcgttgcgcgaagcctttgagttcttcatcaaccaacgtgccaacaagccggctgagctcattgctaaatacgtggatatgaaattgcggtcgggcaacaagggaaccacagatgaggagttggaaaagactctagataaaattatggttctgtttcgctttatacatggaaaagatgtctttgaagcgttttacaaaaaggacttggccaaacgattacttgtgggcaaatcggcatcagtggactccgaaaagagtatgctctccaagcttaagcaggaatgcggtggtggttttacgtccaagctggagggcatgtttaaagacatggaactgagtcgagatatcaaccttgcgttccgcggacacgcattgggcaacaaccgcgatgtccaaaacttggacttgtgcgtcagcattctgaccatgggctactggcccacatatgcgcctacagaggtcacaatgccgccacagttcattaatccgcagcagatttttaacaagttttatctggaaaagcatagtgggcggaagttgcagtggcagcctacattgggaaattgtatgctgcgtgctcaattcgatgcgggtccgaaagaattgttggtgtcgctgtttcaagcgcttgtgcttctattgtttaacgataagccagttctaagctacgaggagatattggccgccaccctaatcgaggatggtgagttgcgcagaacacttcagtccctggcttgtgggcgcgcccgcgtcataacaaaatcaccgaaagggcgcgaaattttggatggcgatcagttcgattttaacaatgagttcacaaacaaattgtttagaatcaagatcaaccaaatacagatgaaagagacaaatgaggagcaaaaggcgaccgaggagcgagtatttcaggatcgccagtatcaaattgatgcggctattgtgcgcattatgaaaatgcggaaaacgttgagccataatcttctcatcaccgagctgtttaaccagcttaccttccctgtcaagcccgctgacctaaaaaagcgaatcgagtcgctcatcgaccgcgactacatggagcgggacaaggataatcaaaaccaatacaactatgtggcataa

SEQ ID NO: 13724 - protein, 821 aa, Drosophila yakuba
MSAAKKYKPMDTTELHENTENIAACLKKAENVAPTAAAASSLGRSAFAAQNMNSASTNGERLPNFSKLGGSHGEIRTPSTTSNLLNRMGAIHNSKPGDVKKIVIKNFKDKPTLPDNYSKDTYVKLEEAVIAIQLSKPIKYSLEELYQAVVNMCSHKMDAQLYAKLKELTEQHVKRNIKLKELTGGSMDKLILLEKINHWWLSFCQQMIMIRSIFLYMDRTYVLQNSSIHSIWDMGLDLFRIHFAQNSVVQKRTVDGILTLIEKERQGSTVDRGLLKSLVRMLCDLQIYTSSFEEKFLDATNQLYKAESQRKMQELEVPEYLQHVNKRLAEENERLRHYLDSSTKHPLIYNVEKELLAEHLTSILQKGLDSLLEDNRLSDLTLLYGLLSRVKNGTSELCGNFNGFIKKKGRTIVIDPEKDKSMVQDLLDFKDKMDVIVRTCFEHNEKFTNSLREAFEFFINQRANKPAELIAKYVDMKLRSGNKGTTDEELEKTLDKIMVLFRFIHGKDVFEAFYKKDLAKRLLVGKSASVDSEKSMLSKLKQECGGGFTSKLEGMFKDMELSRDINLAFRGHALGNNRDVQNLDLCVSILTMGYWPTYAPTEVTMPPQFINPQQIFNKFYLEKHSGRKLQWQPTLGNCMLRAQFDAGPKELLVSLFQALVLLLFNDKPVLSYEEILAATLIEDGELRRTLQSLACGRARVITKSPKGREILDGDQFDFNNEFTNKLFRIKINQIQMKETNEEQKATEERVFQDRQYQIDAAIVRIMKMRKTLSHNLLITELFNQLTFPVKPADLKKRIESLIDRDYMERDKDNQNQYNYVA

SEQ ID NO: 13725 - DNA, 2190 bp, Trichoplax adhaerens
  CDS (1)..(2190)
atggctagtaatcaagcatccgtcaaatcgaccaaattatcggtcaaaaatttcaaacccaaagtacgattaccggatgccggcaaagaggaatggtggaaccaattacgcgaagctgtgcgcgcaatccacaatcgttgtcccatttcgtacaatcgtgaggatttgcataaagcagttggacatatgtgcacacactcgctatctcctcgattatacaacgaattgaaaattcagtgtgaagaatacactaaagcaagtcttcatcagttgatagatgattttatggatgaaatggcatatttgataaaattgaactcactttggaaagatcattgcaatcaaatgattatgattcgtggaatttatctcactttggatcgtacctatgtcatgcaaaatcctttagtattatcgctatgggatatgggattggagctatttcgaaaatttattgttagcgaacaaacagtcgaaaagaaaactattgacggactcctgtctttaatttctcgtgaaaggaatggcgagactattaacaagagcctaattaaaagtcttttacgaatgttaagtgaactccagatgtatcaatatcattttgaaaacaaatttctacaagttacggagtcgctatacgctaccgaaggccaaaatttttcccaatcgctagagattcccgattatcttagtttcgttgataaacgaataaaagaagagagtgaacgatgtttacattatttggaacatagtacaaaaaaaccgttgcttacttccgttgaaaagcaattaattgaatatcgaaaagaaatgattataaataagggtaagaccgaactacttgatactaatcggcttgataagctaaaattgatgtatagcctactagctagagtaaatggaggattagatgaactatgtaaaagatttagtttatatattcaggaacgaggaacttcaatggtaatggatactgagcgtgataaaactatggttactgaactattggattttaaatcgaaattagattcggtgatagaactatcatttgaccataatccaaagtttattaacactgaaaaggattcctttgagactttcataaataggagaaccaataaaccagcggagttaattgcaaagtatattgatatgaaattgcgagctggtaataaggaagcaacggatgaagaattagataaaattcttgataaaattatggtgatgttcaggtttattcaaggtaaagatgttttcgaagcattttataagaaagatttagccaaaagattactagttggccgaagtgcttctgtcgatgcggaaatgtcgatgctgcttaagttaaaacaggaatgtggcgctggatttactagtaagctagaagggatgtttaaagatattgaacattcgaaagaattgatgccacattacaagcagtacttaaataatcagaaaattggccataacttggatatgacagtcaatgttttaatgacaagcaattggccaacgtatcatccaatggacgttattctgcctgagtacatgatttcttatcaaaagcattttcagcaattttatttgtccaagcacagtggtcgtaaattgcaatggattagtacgttaggacattgcgttgtcgcagctaattttcctctgggaaagaaagatattgtagtgtcacttttacaaactctggtactgctacaatttaataaagaagatgaaatctccttcttagacttaaaacaacgtacaggcatcgatgacgcagatatgcgacgtactttacaatctttagcttgtggaaaagttagagtccttcacaaaaagcccaagggtaaagaagttgaagataacgatgtgttcgcttatgtgtcagattttaagcataaacaatttcacatcaaaattaatcaagtgcagatgaaagaaacattggaagaaaatattaatacgaccgagcgtgtatttcaagataggcagtatcagattgatgctgcgattgtgcgtattatgaaaactcgtaaaactctcagtcatgctttgttggtcacagcggtttatgaacagttgaaattccccattaaaccgtcggatttaaagaaaagaatagaaagtcttattgaacgtgattacatggaacgtgacgaagatgacgcatatcagtatcactacgtagcttaa

SEQ ID NO: 13726 - protein, 729 aa, Trichoplax adhaerens
MASNQASVKSTKLSVKNFKPKVRLPDAGKEEWWNQLREAVRAIHNRCPISYNREDLHKAVGHMCTHSLSPRLYNELKIQCEEYTKASLHQLIDDFMDEMAYLIKLNSLWKDHCNQMIMIRGIYLTLDRTYVMQNPLVLSLWDMGLELFRKFIVSEQTVEKKTIDGLLSLISRERNGETINKSLIKSLLRMLSELQMYQYHFENKFLQVTESLYATEGQNFSQSLEIPDYLSFVDKRIKEESERCLHYLEHSTKKPLLTSVEKQLIEYRKEMIINKGKTELLDTNRLDKLKLMYSLLARVNGGLDELCKRFSLYIQERGTSMVMDTERDKTMVTELLDFKSKLDSVIELSFDHNPKFINTEKDSFETFINRRTNKPAELIAKYIDMKLRAGNKEATDEELDKILDKIMVMFRFIQGKDVFEAFYKKDLAKRLLVGRSASVDAEMSMLLKLKQECGAGFTSKLEGMFKDIEHSKELMPHYKQYLNNQKIGHNLDMTVNVLMTSNWPTYHPMDVILPEYMISYQKHFQQFYLSKHSGRKLQWISTLGHCVVAANFPLGKKDIVVSLLQTLVLLQFNKEDEISFLDLKQRTGIDDADMRRTLQSLACGKVRVLHKKPKGKEVEDNDVFAYVSDFKHKQFHIKINQVQMKETLEENINTTERVFQDRQYQIDAAIVRIMKTRKTLSHALLVTAVYEQLKFPIKPSDLKKRIESLIERDYMERDEDDAYQYHYVA

SEQ ID NO: 13727 - DNA, 2355 bp, Ciona intestinalis
  CDS (1)..(2355)
atgtcccgtcgttcctcgatgcaacacaatgggggaggaaacccacacgcacgtagatatattggacttgatcaaatatgggaggatttacaaaaaggcatcagtcaggtatatgcaagacaaagtatggagaagaagagatatatggaactgtatacccatgtttacaactactgtacatctgtggatcagagtgtgtcagcaagacaagcccccaactcatccaccccaccagggagggtctccacaacaaagaaagacagcaaagcaatgacaggagcacagtttgttggcttcgagctttataaaaagctcaagcagaatcttcaaatgtacctagctgataaattgaaggctggagaaaaccttttaaatgaagatgttctacttttctacacaaatcaatgggaagattatcgtttcagtagccgtgttttaaacggggtgttcggttatctaaatcgccactgggtgaaacgggaatgtgatgaagggagaaaggaaatttatgaaatatattcgcttgccctggttatttggagagagaatttgttcaaacctcttaacaagcaagtcacctctgctgtgcttaacttgattgagaaggaaagaaatggagagaccataaacacatcccttataagtggagtgctaaggtcttatgttgcattgggcttaagcgaaaatgaacaaaatcgaacgcagtcactttctgtttacaaagaagcgtttgagagtaatttcctcgctgacacagagagatatttcacctcggaaagccaagaatttcttgctgcaaatcctgtcaccgaatacatgaaaaaggctgaggcgaggctccaggaagaggagagaagggtccaactctacctccacgaatcaactcatgatcagctcgcgaggaaatgcgagcaagtcctcatcgagcaacatcttgagcagtttcatgccgagtttcaaagtttgttaaacgacgataaaaatgaagatcttggccgaatgttcaaactggtttctaagattaaagacggtcttggggaattaaaaaccttacttgaagctcatattcataatcaggctgacgttgcaatcaaacaatgtgcagatacagctgttaatgacccgaagctttatgtgcaaacaatacttgacgtgcacaaaaaatacaacgcgcttgtgcagacgtcgttcgacaacgactctggcttcgtggccgctcttgacatagcatgcggtcgatttattaacaagaatgctgtcactacatcagccaagtcttcatctaagtctccagagttattagcacgatattgcgacacacttctaaaaagtgcaaaggtttcagaagacgctgaattggaggcaacgttaaaggaagtgttgacagtgttccgatatatcgaagacaaagatgtgtttcagactttttattcaaagatgttagcccgacgtctcgtgcaacatacttctgcaagtgatgacgcagaagctcagatgatatcgagattaaaacaaacgtgtggttttgaatacacgtccaagttgcaacgaatgtttcaagacgttgatgtaagcaagaatttaaacgagcgtttccgaactcacatagctgcctctacaccactggatttggatttctcaatacaagttttgagttcgggttcttggccatttcagcagtctgttactttcaggctccctgttgagttggaaaggagttaccagcgtttcaccacattttactcgcaagctcataacggacgtaaactttcatggctctaccagatgtctaagggagaaatcgtaaccaactgtttcaaaaacagatacacattccaggcatccacgtttcaaatggcgattctgttacaatacaactcagccacatcatacactgtgcagcaactcgcggaaaatactcaactgaaaatggaaatcttgttgcaagttttaatccacctgcttaagtgtaagatcctgcagtgcaaagatgagcccgatgctaacaacctcaaaccacataatgaaatagagctttttcttggttacagaagtaaaaaactacgtgtaaacataaacaaacctgtaaaaactgaacaaaaacaagaacaagaggtaacccataagcatattgaagaagacagaaaaatgttaattcaggcggcgattgttcgaatcatgaagatgaggaaacaacagaaacatcaacagttgctctcggaagtcctctcacaactatcctcccgtttcaagccaagagtgccgataattaagaagtgtattgacactctaatagagaaggaatacttagaacgagtggaaggggaaaaagacatgtaccagtacctagcctga

SEQ ID NO: 13728 - protein, 784 aa, Ciona intestinalis
MSRRSSMQHNGGGNPHARRYIGLDQIWEDLQKGISQVYARQSMEKKRYMELYTHVYNYCTSVDQSVSARQAPNSSTPPGRVSTTKKDSKAMTGAQFVGFELYKKLKQNLQMYLADKLKAGENLLNEDVLLFYTNQWEDYRFSSRVLNGVFGYLNRHWVKRECDEGRKEIYEIYSLALVIWRENLFKPLNKQVTSAVLNLIEKERNGETINTSLISGVLRSYVALGLSENEQNRTQSLSVYKEAFESNFLADTERYFTSESQEFLAANPVTEYMKKAEARLQEEERRVQLYLHESTHDQLARKCEQVLIEQHLEQFHAEFQSLLNDDKNEDLGRMFKLVSKIKDGLGELKTLLEAHIHNQADVAIKQCADTAVNDPKLYVQTILDVHKKYNALVQTSFDNDSGFVAALDIACGRFINKNAVTTSAKSSSKSPELLARYCDTLLKSAKVSEDAELEATLKEVLTVFRYIEDKDVFQTFYSKMLARRLVQHTSASDDAEAQMISRLKQTCGFEYTSKLQRMFQDVDVSKNLNERFRTHIAASTPLDLDFSIQVLSSGSWPFQQSVTFRLPVELERSYQRFTTFYSQAHNGRKLSWLYQMSKGEIVTNCFKNRYTFQASTFQMAILLQYNSATSYTVQQLAENTQLKMEILLQVLIHLLKCKILQCKDEPDANNLKPHNEIELFLGYRSKKLRVNINKPVKTEQKQEQEVTHKHIEEDRKMLIQAAIVRIMKMRKQQKHQQLLSEVLSQLSSRFKPRVPIIKKCIDTLIEKEYLERVEGEKDMYQYLA

SEQ ID NO: 13729 - DNA, 2295 bp, Hydra magnipapillata
  CDS (1)..(2295)
atgtcattatctggttcatcaagaccaaaagctacaaatcttgaacaaatatgggatgatttaaaagaaggaattcaacaaatttatttaaaacaaaatatgcctaagcctcgctatatgcagctttatactcatgtttacaactattgcactaatgttcaaaacccaagctcaaacaacaagattccgaaaaaaaaacaaccaaattctggaggtgcacaacttgttggtagtgaactttacaaaaggctgaaagattttttgaataattacttaaacaatctgctaaggtcaggtgctgattttatggacgagtcagttctaacgttttacacacagcagtgggaagggtataagttctcttcaaaagttcttcatggtatttgtgcttatttaaatagacattggattcgaagagagtgcggagaaggcagaaaagatgtatatgaaatttacaatttagcattggttacttggcgtgatgttctattcaaaggactcgatacaagggtaacttatgctgttcttgaattaatacgaagagagagaaatggtgatactataaatacaagcctaatatctggtgtcattgatagttatgttcatttgggtataaatgaagaagatactcgcaccactgggcctaacctttctgtctatcgtaagcagtttgaatcaatttttttgcaggacacagaacaatactatacagctgaaagtgaagcatttttagctcataatcctgtgactgaatacatgaaaaaagctgaaattcgattaaatgaagaaaggcggcgtgtttttgtttatttacatgagagtactcagatagaacttgcaagaaagtgtgaacaggttctgataaaaaaacatttagaaactctttatggagagtttcgtcatcttttaggcgatgacaaagacgaagatttaggaagaatgtacaatctagtatcacgtgtaccagatggtttggttacattgaagcagcttttagagcagcatatacacactcaaggtttaaacgtaatagagaaatgtggtgaagctgctatcaatgatccaaagatgtacgtaactacaatgctaggtgtacatcgcaaatattatgctttggttgtatctgcttttagtaatgataatggctttgttgctgcacttgataaagcttgcggaagatttgttaatgcaaattccgtcactaaagcagcaggaaattcgtcaaaatctccagaacttttagctcgctattgtgattcactcctgaaaaagagtgcaaagaatccagaagaggcagagctagaagatattcttaattctataatgataattttcaaatatgttgaagacaaagatgtttttcaaaagttttactccaaaatgttggctaaacgtttggttcaacaaaattctgcatctgatgatgcagaagccacaattatttcaaagttaagggaaatgtgtggttatgaatacacaaacaaactgcagagaatgtttcaagatatgaatgttagtaaggacttaaatgataaattcaaaaagcatgtttcaagtcaagaaaatggtgaagttgatttcagtatccaagttttatcttctggtgcttggccttttcaacaatctcctatatttacattaccccctgagttggaaaggtgtttacagcgatttacaacattttataatgctcaacatagcggtcgaaaattacattggctctatcaactatcaaaaggagaacttgttactaattgttttaaaaatagatatacattacaggcatcaactcatcaaatggctgtactgttaatgtataacagtgaagatagttacactgttgaacaaatacaagaacatacccaaattaatatggatattcttcaacaagtgttaagtatattaataaaaattcgtttattgattagcaatcctactattgttgaaaatttccctcttacttctgtaatacatctttataaagaatacaaaaataaaaaacttcgtgtaaatataaatgtaccaatgaaaactgagcaaaagctggagcaacaacaaactcacaaatatattgaagaagatagaaaattacttgtacaggcttgtatagttcgaataatgaaaatgcgtaaagttatgaagcatcagaatttacttacagaagtacttactcaactatctgctcggtttaaacctggaatacctgtaattaagaaatgcattgacattcttatcgaaaaagaatatcttgaacgtgttgaaggggagaaagatacatacagctacttagcataa

SEQ ID NO: 13730 - protein, 764 aa, Hydra magnipapillata
MSLSGSSRPKATNLEQIWDDLKEGIQQIYLKQNMPKPRYMQLYTHVYNYCTNVQNPSSNNKIPKKKQPNSGGAQLVGSELYKRLKDFLNNYLNNLLRSGADFMDESVLTFYTQQWEGYKFSSKVLHGICAYLNRHWIRRECGEGRKDVYEIYNLALVTWRDVLFKGLDTRVTYAVLELIRRERNGDTINTSLISGVIDSYVHLGINEEDTRTTGPNLSVYRKQFESIFLQDTEQYYTAESEAFLAHNPVTEYMKKAEIRLNEERRRVFVYLHESTQIELARKCEQVLIKKHLETLYGEFRHLLGDDKDEDLGRMYNLVSRVPDGLVTLKQLLEQHIHTQGLNVIEKCGEAAINDPKMYVTTMLGVHRKYYALVVSAFSNDNGFVAALDKACGRFVNANSVTKAAGNSSKSPELLARYCDSLLKKSAKNPEEAELEDILNSIMIIFKYVEDKDVFQKFYSKMLAKRLVQQNSASDDAEATIISKLREMCGYEYTNKLQRMFQDMNVSKDLNDKFKKHVSSQENGEVDFSIQVLSSGAWPFQQSPIFTLPPELERCLQRFTTFYNAQHSGRKLHWLYQLSKGELVTNCFKNRYTLQASTHQMAVLLMYNSEDSYTVEQIQEHTQINMDILQQVLSILIKIRLLISNPTIVENFPLTSVIHLYKEYKNKKLRVNINVPMKTEQKLEQQQTHKYIEEDRKLLVQACIVRIMKMRKVMKHQNLLTEVLTQLSARFKPGIPVIKKCIDILIEKEYLERVEGEKDTYSYLA

SEQ ID NO: 13731 - DNA, 2361 bp, Hydra magnipapillata
  CDS (1)..(2361)
atggaaaatgatagtttatatggaaaaaatggctttaacaaagaaaatcatattacagaaaatggcttcatcaaggaaaatctttttgcagaaaataaacattgtaacaaaagtaacacttctctcaatgagggttttatgtcaaccccaaatcatgctaagaaattagtcattaaaaatttcaaagtaatacccagtctccctgataactacaaagatgtaacttttgagaaattaaaagatgctgttagtgctattcatctagaacattctatttcatatagtcttgaagaactttacaaagcggtagaaaatttgtgttcacataatatgtcgtctcagttgtatgaaagactcagagaagtttgtgaagagcatgttaaaactatcattgcagagttttcttcatatccttttaatttaaatattttctttgaccttcatttaactgatatcattgataattttgtttttttaaaaaaaatggataaacaatgggagtcacactgtcggcagatgaccatgatcagaagcatttttttgtatcttgatagagtatatgtactgcaaaactcatcagttctttcaatatgggatgttgggcttcaactatggagaatacacattatgggtcatccttttattcaatcaaagacattacttcataaaaaagcttttagcatcaattactgcaatagtgaaacagttgacagaagtttactgaagagattaataaaaatgctagctgatcttcagatgtaccaacaaatatttgaaccagtttttttaaaagaaactgatcaattgtatttggttgaaggaaatacattaatgtcaaaagtagatgtcccaaactatttacaacatgtggaaaggcgactaaaagaagaatcagagcgactttttcattatttagaaccatgtactagaaaagctttgatcagttctgttgaaaatcaaatgattagttgtcatcttacaaatatactcaacaaagggtttaactacttaatggattgcagtgcaaatgttcatcttttgcttatgtacaatttattttcaagggtaaaaaacgggctcgatagtttgtgcgaatattttggtgcttacataaaggtaaaaggtcttacaataattaatgatacagaaagagataaatacatggtacaagaattgcttgaatttaaagagaagttagacatgcttattgaagagtcatttaacaaaaatgaaaagtttatcattactatgaaagactcttttgaatattttattaacaaacgaccaaacaaacctgcagaacttatagcaaaatttgtggatataaaactcagagctggaaataaggaggcaacagaagatgaacttgaaagaagattagacaaaatcatgatcctttttagatttatacatggaaaagatgtttttgaagcattttacaaaaaagatttagcaaaaagactattacttggtaaaagtgcctcagttgatgccgaaaagtcaatgttgtctaagttaaagcaagagtgtggcggtgcattcactggcaaactggaggggatgtttaaagatatggaactttcaaaagacatcatgagtagttacaaacaaatggttcagcttcagaacacttcttctggcattgatctaaatgtaaacatattaacaatgggatattggcctacttacacacctatcgatgttcttctgcctaatgaaatggtgaaacttcaggaggtttttcataagttttatttgagtaaacacagtggaaagaagttacagtggcaaacaaatcttggaagttgtacagttttagcttgttttccatcaggaaatcatgagctgcacgtatcgttgtttcaacttttgtgtttgcttcaatttaatgaaggtgatgaatttttatttgaagatcttcttacagctacaggaattgaagagggagagttaaaaaggacgatacaatctttagcatgtggcaaaatcagagtcttgcggaaattacctcaaggaaaagaagtaaacagaggggacaaactaatattcaacaagaagttttctcataatttgtataaaataaagattaatcaagttcaaatgagagaaacacaagaagaaaatcaattaacaaacgagcaagtattccaggatcgccaatatcaaattgatgcagcaattgttcgaatattaaaaacccggaaaagtttaattcataacctcctcgtcacagaattatacagtcaacttaagttttccgtaacgccctccgatattaaaaaaagaattgaaagtttgatagacagggattacatggaacgagataaagataactccaatacttaccattatattgcgtaa

SEQ ID NO: 13732 - protein, 786 aa, Hydra magnipapillata
MENDSLYGKNGFNKENHITENGFIKENLFAENKHCNKSNTSLNEGFMSTPNHAKKLVIKNFKVIPSLPDNYKDVTFEKLKDAVSAIHLEHSISYSLEELYKAVENLCSHNMSSQLYERLREVCEEHVKTIIAEFSSYPFNLNIFFDLHLTDIIDNFVFLKKMDKQWESHCRQMTMIRSIFLYLDRVYVLQNSSVLSIWDVGLQLWRIHIMGHPFIQSKTLLHKKAFSINYCNSETVDRSLLKRLIKMLADLQMYQQIFEPVFLKETDQLYLVEGNTLMSKVDVPNYLQHVERRLKEESERLFHYLEPCTRKALISSVENQMISCHLTNILNKGFNYLMDCSANVHLLLMYNLFSRVKNGLDSLCEYFGAYIKVKGLTIINDTERDKYMVQELLEFKEKLDMLIEESFNKNEKFIITMKDSFEYFINKRPNKPAELIAKFVDIKLRAGNKEATEDELERRLDKIMILFRFIHGKDVFEAFYKKDLAKRLLLGKSASVDAEKSMLSKLKQECGGAFTGKLEGMFKDMELSKDIMSSYKQMVQLQNTSSGIDLNVNILTMGYWPTYTPIDVLLPNEMVKLQEVFHKFYLSKHSGKKLQWQTNLGSCTVLACFPSGNHELHVSLFQLLCLLQFNEGDEFLFEDLLTATGIEEGELKRTIQSLACGKIRVLRKLPQGKEVNRGDKLIFNKKFSHNLYKIKINQVQMRETQEENQLTNEQVFQDRQYQIDAAIVRILKTRKSLIHNLLVTELYSQLKFSVTPSDIKKRIESLIDRDYMERDKDNSNTYHYIA

SEQ ID NO: 13733 - DNA, 2301 bp, Schizosaccharomyces japonicus yFS275
  CDS (1)..(2301)
atgaattccaacaatggtaaagttttgccagctgtgcaagtctatgataatttaaacgggaattggccattgctacgctctggcatcgcccaaattcttgaaaaacttgatgatggaatgacaattgcacgatacatggagttatacactgctattcataactactgtgctgatgcttcaaaaactgtttctgccgacagttttggagatcggagcgtgagtgtattaggtgaagctttgtataacaatcttgtgctgtacctctcaaaatacttagaacagctgagacaggtatggtcgttctccaatcatcctggacaaattgcgctagaagcgtatgctgcaagttggaaaaagtacactacggctgccggcttcttaaatcatctatttcgttacttgaaccgttactgggtgaagctaaaaaaccaatttacggaggcatatgtgtacgatgtgtatactctgtgtttggttagctggcagcaacatatttttcaatatgtatcgaaggacctattacaggaccttctccgtttatttacgaagctccgccattatgagccggtggacatgaaggatgtcaaaatatgtatagagtctattacgtcgttgagtttcgacaaaaccgacttgtcaaaacctactctcaaactgtataaagatttctttgagcgtcagttcctaagcgctacccaaacattttacgaggacgaggctgcacggttcattcagtcgtgctcagtcgtagactacatgaaaaaggcggaaacacgtctttccgaagaagaagaacttgtcaagctatatcttcatgagtcaactttacagccacttttaagggttgttgagaatactctgattacgttgcatgccagtaccttacatgaagccttccctggtttgcttgaagatggcagacttgaagatgtggttcgtatgtaccagttgctatcccgcactgacaacggcttacaacctctgcgggttgcgtttgaaatgtgtgttcggaaatctggtttggctagtgtggacaatgtcgttgctgcaaccaatccaggcgaagacacggacccacatgcttacttgcatgctcttttgtccgtttatgaacggtacagaaaaatcgtcacttctgcgtttaatggtgactcggagtttaccaaatacttggataatgcttgtcgcgagtttattaatcgaaacgctgtgtgcaagacctcctcatcccgttctcccgaattgctagctcgatatactgatgctgttttgcgacggaacagtaagactggcgacactgaggacattgaacaggttctctcctccgtaatgattgtgttccgttacgttgaggataaagatgtcttccaaaagttttatgcaaaattcctagcaaagcgtttggtaaacggcacctcgacttcggaagacagcgaatcgagtatgctttcgaaattgaaggaggcctgtggttttgaatacactaataagctgcagcgaatgatacaggacatcggcttgtcatcggatcttactgatgctttccacgctcaacagccgtcaaaattgtctcccattgattttaatatccttgtcctcagtacatcttcatggccgctttcttcgtcttcaacaacctttcggttacctaacgagcttgctgagctacatgatgcctttcaaaacttctaccagaacaagcatagcggccgtaagctgaactggctgatgcacttgtccaagggcgagatgaaggcaaagtttggtgactcgtcctccactacctatattctacaagtttccacataccagatgggagtgttactgttatacaacgcggctgattcctacacatttgcagagctgcaacaaaacacggagctttcagcaacttatttgagtggcattctgcgtatctttttacgtgcaaaaattttggtccagcaaggaaacaacaagcttgatgacccgtcgaccgtgtttgctttgaaccgccagtttcgttcgcgccgcattcgtcttccccttaatttacctatcaaaacggagcaaaagcaggagtccgctgaaacacaaaaaactatcaaagaggacagaaaactgctactgcagtctgcaattgtgcgtatcatgaaggcacgaaagacgctgaaacacgttgtgcttgtgaaagaaaccattgatcaaatcaagtctcgcttcaagcccgaggttgctgacattaagcgttgcatcgatatcctcatcgaaaaagagtacttggaaagacaaggtcgggacgagtatgtttacctggcttaa

SEQ ID NO: 13734 - protein, 766 aa, Schizosaccharomyces japonicus yFS275
MNSNNGKVLPAVQVYDNLNGNWPLLRSGIAQILEKLDDGMTIARYMELYTAIHNYCADASKTVSADSFGDRSVSVLGEALYNNLVLYLSKYLEQLRQVWSFSNHPGQIALEAYAASWKKYTTAAGFLNHLFRYLNRYWVKLKNQFTEAYVYDVYTLCLVSWQQHIFQYVSKDLLQDLLRLFTKLRHYEPVDMKDVKICIESITSLSFDKTDLSKPTLKLYKDFFERQFLSATQTFYEDEAARFIQSCSVVDYMKKAETRLSEEEELVKLYLHESTLQPLLRVVENTLITLHASTLHEAFPGLLEDGRLEDVVRMYQLLSRTDNGLQPLRVAFEMCVRKSGLASVDNVVAATNPGEDTDPHAYLHALLSVYERYRKIVTSAFNGDSEFTKYLDNACREFINRNAVCKTSSSRSPELLARYTDAVLRRNSKTGDTEDIEQVLSSVMIVFRYVEDKDVFQKFYAKFLAKRLVNGTSTSEDSESSMLSKLKEACGFEYTNKLQRMIQDIGLSSDLTDAFHAQQPSKLSPIDFNILVLSTSSWPLSSSSTTFRLPNELAELHDAFQNFYQNKHSGRKLNWLMHLSKGEMKAKFGDSSSTTYILQVSTYQMGVLLLYNAADSYTFAELQQNTELSATYLSGILRIFLRAKILVQQGNNKLDDPSTVFALNRQFRSRRIRLPLNLPIKTEQKQESAETQKTIKEDRKLLLQSAIVRIMKARKTLKHVVLVKETIDQIKSRFKPEVADIKRCIDILIEKEYLERQGRDEYVYLA

SEQ ID NO: 13735 - DNA, 2328 bp, Schizosaccharomyces japonicus yFS275
  CDS (1)..(2328)
atgcaacggcctggcaaacccaaaattcgggctcctcgaaaattctatccgaaagcaagagactggaaggaatcatggtccgttttgtctagtgccattcaggaaatctttcagaaaaatacgtcaaaactttccttcgaggaattgtacagaaacgcatatacactagtgctgtataaaaatggagacaaactctacaatggtgttagtgaattaattgcttcgagactttctacaactataaaagaaacactcaataatgactgtgatgctaaaacaattgagcagaaaaacactgcaactaactctaaacaacaacttgcatcctgcgagcgttatctttctgctgtcgaaaaatgctggtccgaacacacagtagccatgtatatgattgcgagtgttctcaagtacatggacaaaacttactcaaaggaagctggcgaattgccgatctatgatatggggttgctgctctttcgtgataatgtactatttaaagaagataacttggggcaactggtgattgaagcagttttgaagcttgtggaaatggaccgcaatgacatgagcattaatcgaccagttgttaaatcttgtttagagatgcttattctccttccttcaaagacaaaaaatcttaccctctatgactcattcttcacacctttactccttgagacgagtcgcacattttacgcggaagaagcgacagagtttttggaatgttatactgttccagagtatttgaaatggctgaatgaaagaattgagcaagagaacaaccggatgcggcactacttgtctactcgcgttgagacacaagtaataggcgttcttcgagatgagtttttgagtaaacggctaacggctattctcgaaatgccttcatccggtctctggtttatgattgaaaattcacaaattgcagaactaacccagctatacaacagcttcttaaccatcaccgagggtatccctcaactgcgtcaatttctctacaaccgtgtcatcgaaaaaggtcgcgagattaatgcgaacactgaaagaaaatcctctagtgaaacaggcaaaccactatctacgacgtccatcgcaacacaatgggtctcttctgtactcgcattgtggactaaacttacgtctatcctcaccgagtccatgaataatgaccggctcattcacaacaccatttctgatgcatttaccagtttcattaatgactgcccccgttcaccagagtacatttctctcttcattgacgactatctaaagaagggtcttcggggccaatccgaggcagaagtggagcagatgttacagaaatctgtcacccttttccggtttgtttctgaaaaagacgttttcgagaaatactacaaaatacacttggcaaaacgtctactgaacaaccgactgagctcggaagatgttgagctggaattgataagtcgactcaagttagaggcaggaaatgtcttcacctcaaaaatggagggaatgcttaccgacatgcggctatctcaagatgcgaacaaagagtacaaggactatctcacagaaaacaacatttcgtcggcctttgacctcaatgtttctgtccttgcttcctccttctggcctgtggagatgcagccggagaagctgaaatgtaacttccctcaagaattagaagaagcaaaggacgtatttacttcgttttatctttcaaaacacagcggccgacagcttgcatggtacccaacaatgggcactgcagatgtccgtgtcgcgttcaaaaacagaaagcacgatttgaatgtgtctaccgtggcacttatgattctgctgcattttgaggatgttgaggcaaccgaacccatactctacgagacgcttcgtgaccgaatccagatcgaagaatcggatttaaaacgcaacctgcagtctctcgcatgtgcgaaatacaagattctactcaaagagcccaaaggccgcaacataaatccgggtgacaagttctacttcaacgacgcgttcacatccaatctcgcacgcattaaaattgctacagttgctagtgctcgtgtggagaatgaccatgaacgcaaggaaacactggagaaaattgacgaatcgcgcaaacaccaagtggaggcttgcattgttcgtgtcatgaaggacagaaaaacgttggaccataaccaactaatcgcggaagtgtctcgacaacttagcacacggtttatgcccaatccaatgatgataaaacgaagaattgaggcattgattgagcgcgaatacctccaacgcaatgccgacaattcccgagtctacgagtatctcgcctag

SEQ ID NO: 13736 - protein, 775 aa, Schizosaccharomyces japonicus yFS275
MQRPGKPKIRAPRKFYPKARDWKESWSVLSSAIQEIFQKNTSKLSFEELYRNAYTLVLYKNGDKLYNGVSELIASRLSTTIKETLNNDCDAKTIEQKNTATNSKQQLASCERYLSAVEKCWSEHTVAMYMIASVLKYMDKTYSKEAGELPIYDMGLLLFRDNVLFKEDNLGQLVIEAVLKLVEMDRNDMSINRPVVKSCLEMLILLPSKTKNLTLYDSFFTPLLLETSRTFYAEEATEFLECYTVPEYLKWLNERIEQENNRMRHYLSTRVETQVIGVLRDEFLSKRLTAILEMPSSGLWFMIENSQIAELTQLYNSFLTITEGIPQLRQFLYNRVIEKGREINANTERKSSSETGKPLSTTSIATQWVSSVLALWTKLTSILTESMNNDRLIHNTISDAFTSFINDCPRSPEYISLFIDDYLKKGLRGQSEAEVEQMLQKSVTLFRFVSEKDVFEKYYKIHLAKRLLNNRLSSEDVELELISRLKLEAGNVFTSKMEGMLTDMRLSQDANKEYKDYLTENNISSAFDLNVSVLASSFWPVEMQPEKLKCNFPQELEEAKDVFTSFYLSKHSGRQLAWYPTMGTADVRVAFKNRKHDLNVSTVALMILLHFEDVEATEPILYETLRDRIQIEESDLKRNLQSLACAKYKILLKEPKGRNINPGDKFYFNDAFTSNLARIKIATVASARVENDHERKETLEKIDESRKHQVEACIVRVMKDRKTLDHNQLIAEVSRQLSTRFMPNPMMIKRRIEALIEREYLQRNADNSRVYEYLA

SEQ ID NO: 13737 - DNA, 2262 bp, Branchiostoma floridae
  CDS (1)..(2262)
atgtcgctgaaaagcaagaaggacaccaagatgcggatcagggcctttcccatgacaatggatgagaagtatgtgaacagtatctgggccctgctgaagaatgccatccaggagatccagaagaagaacaacagcggcctgagttttgaggagctgtacaggaatgcctacaccatggtactccacaaacatggggagaaactgtacacaggactgagggaggtggtcacagaacatctcgttaataaggtgcgagtggatgtgctggagtctctcaacaacaacttcctgcagaccctgaacagtgcgtggaacgaccaccagacctccatggtcatgatcagggacatcctcatgtatatggaccgtgtttacgtgcagcagaacggagtagagaacgtgtataacctgggcctgatgttgttccgagaccaggtggttcggtacggctgtatccgagaccacctgcgccagacactgctggacatggtggcacgtgagcgcaggggagaggtcgttgacaggggagcagtgaagaacgcatgtcagatgctgatgatcctgggtatcgagagcaggcaggtttacgaggaggactttgaacagcctttcctggagcagtccgcagagttctataggttggaaagtcagaagttcctagcggagaacagcgcctcagtgtacatcaagaaggttgagcagagaatcaacgaggaggccgagagagccaagcactacctggacaaaaccacagaggagcccattgttaaagtcctggaggaggaactcatcagcaagcacatgaaaactattgtagatatggagaactctggagtagtacacatgctgaagaacaacaagacagacgacctagcctgtatgtacaagctgttcatccgcgttcccgatgggctcaagacgatatgcgagtgcgtcagcaagtacctgagagaacagggcaaggccattgttacagaggaggggcagggtggcgagcccaaaaaccccatcacatatgtacagagcctgttggacctcaaggaaagattcgaccacttccttcacgagtccttcagcgacgacaaggtgttcaagcaacaggtttcctcagacttcgagtacttcttaaacctgaaccagaagtctcccgagtacctgtctctcttcatcgacgacaagctcaagaagggagtcaaggggctgacagagcaggagatagaaaacatcctggacaagacgatggtgctgttccggtacctccaggagaaggacgtgtttgagcgttactacaagcagcacctcgcccgaaggttactcatgaacaagagtgtctctgacgactccgagaaaaacatgatctcaaaactcaagacggagtgtggctgtcagttcacttccaagcttgaggggatgtttaaggacatgtccatctccaactctctcatggacgacttcaagcagcatctacaaaatacagggacgaccttgagcgggattgacctgagtgtccgagtcctgaccacgggattctggccgacccagtcgtcttctccaaagtgtaacatccctgtacaagccaggaacgccttcgaaacatttaagaggttctatttagtaaaacacagcggccgtcagctgacgttgcagcaccacatgggctcagctgacctcaacgcaacattttatgggcccagaaaggagggaggaggcagtaacgcacggaagcacattctccaggtctccaccttccagatgtgtgttctcatgctcttcaacaacagggacaagctcacctatgaggaaatccagagtgagacagacatccctgacagggacctgacgcgggcactgcagtcgctggcactcggaaaggctcagcagcgagtgttggtgaaggaacccaaggtgaaggagatcgagccatcgcatcagttctacatcaacgaccagttcacatccaaactgcacagggtcaagattcagacagtggcagcgaagggcgagtccgacccggagcggaaggaaaccaggaacagggtggacgaggaccggaagcacgagatcgaggcggccattgttcgaatcatgaagtcacgcaagaggatgcagcacaacgttctggtagcagaggtaactcaacaattgaaggcacggttcctaccgagtccagttgtaatcaagaagaggatggaaggcttgatcgagagagaatacctggctagagccccagaggataggaaagtgtacacatacgtcgcctag

SEQ ID NO: 13738 - protein, 753 aa, Branchiostoma floridae
MSLKSKKDTKMRIRAFPMTMDEKYVNSIWALLKNAIQEIQKKNNSGLSFEELYRNAYTMVLHKHGEKLYTGLREVVTEHLVNKVRVDVLESLNNNFLQTLNSAWNDHQTSMVMIRDILMYMDRVYVQQNGVENVYNLGLMLFRDQVVRYGCIRDHLRQTLLDMVARERRGEVVDRGAVKNACQMLMILGIESRQVYEEDFEQPFLEQSAEFYRLESQKFLAENSASVYIKKVEQRINEEAERAKHYLDKTTEEPIVKVLEEELISKHMKTIVDMENSGVVHMLKNNKTDDLACMYKLFIRVPDGLKTICECVSKYLREQGKAIVTEEGQGGEPKNPITYVQSLLDLKERFDHFLHESFSDDKVFKQQVSSDFEYFLNLNQKSPEYLSLFIDDKLKKGVKGLTEQEIENILDKTMVLFRYLQEKDVFERYYKQHLARRLLMNKSVSDDSEKNMISKLKTECGCQFTSKLEGMFKDMSISNSLMDDFKQHLQNTGTTLSGIDLSVRVLTTGFWPTQSSSPKCNIPVQARNAFETFKRFYLVKHSGRQLTLQHHMGSADLNATFYGPRKEGGGSNARKHILQVSTFQMCVLMLFNNRDKLTYEEIQSETDIPDRDLTRALQSLALGKAQQRVLVKEPKVKEIEPSHQFYINDQFTSKLHRVKIQTVAAKGESDPERKETRNRVDEDRKHEIEAAIVRIMKSRKRMQHNVLVAEVTQQLKARFLPSPVVIKKRMEGLIEREYLARAPEDRKVYTYVA

SEQ ID NO: 13739 - DNA, 2469 bp, Branchiostoma floridae
  CDS (1)..(2469)
atgcctttttcaaatgcaacgaggaagaaggcatcccacgaccagcaggacacggaacggagccagagaaagcggcgagtatccggagagaaccgtcaaggtttggccggcttgaagagacacaagcaggaagactctgatttttgtcactccgatcctcatcattcgagctcacagatggacgaatccgtcaacagtcgcaagccgaacttctcggctctggttggcagtaatggcctgacgaatagagcatcttctctggccaacagcaagcctggtacggccaagaaactggtgatcaaaaatttcaaaggtaaacccaagctacacgacaactacaaggaggagacatggatgaagttgcggggagcggtggacgccatccacaagagcacctctatcaagtacagtctggaggagctgtaccaggcagtggagaacatgtgttctcacaagatggcagtcatgttgtatgactcgctcaaggtggtgtgtgaggaacacatcaagcaccagatcacacaactgtttgaagttgaccttgactgttgccctactgatgagttggacagtgttttgttcctgaggaagatcaacaaatgttggcaggaccactgtagacaaatgattatgatccgtagcatcttcctgttcctggatagaacctatgtattacagaactccatggtatcatctctttgggacatgggcctggacctgttccgtcagcacatcatcagcgacacttccgtgcagaccaagacggtggacggactcctgcttctcatcgagagggagcggaacggggagatggtggatcgcagtctgctcaagagcctgctgggaatgttgtcagacctacagatttacaaggaggcctttgaggtgcgttttctgcaagagacagagagattgtacgcggccgagggacagagacttatgcaggagagagagattgcggagtaccttcaccatgtggataagagactagaagaggagcaggacagactgatgttctacatggatcagagcacacagaagccactagtgtcatgtgtagagaaacaactgttaggggaacacctggtgaacatcctacagaagggtctgcaccagctgctggatgagaacagaacagacgacctgaagctgctgtacaacctgttctctagagtcaaggctgggctggagactctgtgtcagcactggggagactacatcaaatctttcggctccactatagtcatcaacccagagaaggacaagacaatggtgcaggaactgttagacttcaaggacaaggtggacaacatcctccagagctgcttctcaagtaacgagaagttcatcaacaccatgaaggagtcttttgagacgttcatcaacaagagactgaacaagccagcagagttgatagcaaagtatgttgattccaagctgagagcaggaaataaggaagctacagaggaagagttggagagaatgttagacaagatcatggttctctttagatttatacatggtaaggatgtgtttgaagccttctacaagaaagacctggccaagaggttgttggtggggaagagtgcatccgtagatgctgagaagtccatgctctccaaactcaagcaagaatgtggaggtgccttcaccagtaagctggaaggcatgtttaaggacatggagctgtctagagacatcatggttcacttcaaacagcacatccagcatcagaaagactccataagcatagacctgactgtgaacatcctgacgatggggtactggcccacatacatccctatggaggtgcatctcccacctgagatggtgaggtaccaggagatctttaagtcgttctacctggccaaacacagcggtcggaagttacagtggcagccgaccctcgggcactgtgttctcagggctgacttcagagcgggtaagaaagagctgcaggtgtccctgttccagtccctggtactcattatgtttaatgatggggacgacttcactaccgagtacatcaaacagtacacaggcatcgaggatggggagttgaggagaacgttacaatcattagcatgtgggaaagccagggtcatcatcaagaccccaaaggggaaggatgttgaggatggagatcagttcaccttcaacaacgacttcaaacacaaactgtacaggatcaagattaaccagatccagatgaaagaaacgcaagaggagaatgtgaacacaacagagagagtgttccaggacagacagtaccagatcgatgcagccattgtccgcatcatgaagaccagaaagactctgactcacacacttctggtgtctgaactgtacaaccagctcaaattcccagtcaagcctgcagacctgaagaagagaatcgagagtcttattgatagagattacatggagagggacaaggaaaactccaaccagtaccattatgtagcatag

SEQ ID NO: 13740 - protein, 822 aa, Branchiostoma floridae
MPFSNATRKKASHDQQDTERSQRKRRVSGENRQGLAGLKRHKQEDSDFCHSDPHHSSSQMDESVNSRKPNFSALVGSNGLTNRASSLANSKPGTAKKLVIKNFKGKPKLHDNYKEETWMKLRGAVDAIHKSTSIKYSLEELYQAVENMCSHKMAVMLYDSLKVVCEEHIKHQITQLFEVDLDCCPTDELDSVLFLRKINKCWQDHCRQMIMIRSIFLFLDRTYVLQNSMVSSLWDMGLDLFRQHIISDTSVQTKTVDGLLLLIERERNGEMVDRSLLKSLLGMLSDLQIYKEAFEVRFLQETERLYAAEGQRLMQEREIAEYLHHVDKRLEEEQDRLMFYMDQSTQKPLVSCVEKQLLGEHLVNILQKGLHQLLDENRTDDLKLLYNLFSRVKAGLETLCQHWGDYIKSFGSTIVINPEKDKTMVQELLDFKDKVDNILQSCFSSNEKFINTMKESFETFINKRLNKPAELIAKYVDSKLRAGNKEATEEELERMLDKIMVLFRFIHGKDVFEAFYKKDLAKRLLVGKSASVDAEKSMLSKLKQECGGAFTSKLEGMFKDMELSRDIMVHFKQHIQHQKDSISIDLTVNILTMGYWPTYIPMEVHLPPEMVRYQEIFKSFYLAKHSGRKLQWQPTLGHCVLRADFRAGKKELQVSLFQSLVLIMFNDGDDFTTEYIKQYTGIEDGELRRTLQSLACGKARVIIKTPKGKDVEDGDQFTFNNDFKHKLYRIKINQIQMKETQEENVNTTERVFQDRQYQIDAAIVRIMKTRKTLTHTLLVSELYNQLKFPVKPADLKKRIESLIDRDYMERDKENSNQYHYVA

SEQ ID NO: 13741 - DNA, 2226 bp, Vitis vinifera
  CDS (1)..(2226)
atgacaataaatgacaacaaaataaccgacttagatcatggatgggattatatgcagaaggggatcataaagctgaagaaaattctggaagggttaccagaaccacaattcagttcggaagattatatgatgctttatacaacaatttataacatgtgcacccaaaagccccctcatgattactctcaacagctttatgaaaaatacagagaggcattcgaagaatacattactgtaactgtattgccctctttaagagataagcatgacgaatttatgctcagggagcttgtgaagagatgggcaaatcataaagttatggttaagtggctgtcacggttcttttattatctggatcgctatttcattgctcggaggtcacttcctgcactgaatgaagttggacttgcttgcttccgggaactggtttaccaggaggtgcacggtagagtcaaagatgctgtaatcagtcttattgatcaagaacgcgagggagagcagattgacagagctttgttgaagaatgttctggatatttttgttgaaattggaatgggaaaaatggattattatgcagatgactttgaagcagatatgcttaatgatactgctgcttattattctcggaaggcatcaaactgggtgctgaaagattcttgtccagattacatgttaaaggctgaagaatgcttgaaaagggagagggatagagtttctcattacctgcatataagcagtgagccaaaactagtggagaaagtgcaaactgagttgttggtggtatatgctaaccagctgcttgaaaaggagcaatctggctgccatgccttgctcagagatgaaaaggtggatgatctctccaggatatataggctctaccacaaaatacctcgaggcttggaacctgtttctagcatatttaaacagcgtgtctctgatgagggtcttgccttagtcaatcaggctatagatgctgctaacaaccaggcagagaatgtgcgcagtgtgcatgaacaggtacttgtcagaaaaattatagagctgcatgacaagtatatggtgtatgtgtgcaattgttttatgaaccaatctctctttcacaaggccctgaaagaggcttttgagatattttgcaacaagactgttgcaggctgctcgagtgcagagctactggctgcattctgcgacaatattctgaagaagggtgggagtgagaaattgagcgatgaagccattgaagacacacttgagaaggtggttaaactgcttgcatatatcggcgataaagacctttttgctgaattctacaggaaaaagcttgctcgtcgtctcctttttgacaggagtgctaatgatgagcatgaaaggagtattctgacaaagttgaagcagcaatgtggtggacaattcacctcaaagatggagggaatggtcacagatttggcgttggcaagagaaaatcaaggccactttgaggaataccttagcaataacccaattgcaaatcctgggattgatttgacggttactgtacttacgactggatactggccaagttataaatcttctgatctcaacctacctgcagagatggtaagatgtgtagaagttttcaaggaatattaccatagtaaagcacagcagagaaaactttcttggatatactcattgggcaattgcaacattagtggcaggtttgattcaaaaacaattgaattaatcgtgtcaacctatcaggcctctgtcctcctgctatttaacaattcagacaggttgagtttttcggaaatcatggatcagtcaaacttgggccatgatgacttggttagagtgctcctttctctgtcatgtgcaaagtataagattctcaacaaggaaccaaacacaaaaaccatctctccaactgactactttgagttcaattccaagtttactgacagaatgaggagaatcaagattcctcttccacctgttgaggaaaggaaaaagatagttgaagatattgacaaggacagaagatatgctattgatgcctcaattgtgcgcataatgaagagtcggaaaatcttgtctcatcaacagctggtcacagagtgtgttgagcagttaagccgcttgtttaagcctgattttaaggcaataaagaagcggattgaagatttgatcagccgagattatctagaaagagacaaggagaaccccaacttgtataggtacgtcgcctga

SEQ ID NO: 13742 - protein, 741 aa, Vitis vinifera
MTINDNKITDLDHGWDYMQKGIIKLKKILEGLPEPQFSSEDYMMLYTTIYNMCTQKPPHDYSQQLYEKYREAFEEYITVTVLPSLRDKHDEFMLRELVKRWANHKVMVKWLSRFFYYLDRYFIARRSLPALNEVGLACFRELVYQEVHGRVKDAVISLIDQEREGEQIDRALLKNVLDIFVEIGMGKMDYYADDFEADMLNDTAAYYSRKASNWVLKDSCPDYMLKAEECLKRERDRVSHYLHISSEPKLVEKVQTELLVVYANQLLEKEQSGCHALLRDEKVDDLSRIYRLYHKIPRGLEPVSSIFKQRVSDEGLALVNQAIDAANNQAENVRSVHEQVLVRKIIELHDKYMVYVCNCFMNQSLFHKALKEAFEIFCNKTVAGCSSAELLAAFCDNILKKGGSEKLSDEAIEDTLEKVVKLLAYIGDKDLFAEFYRKKLARRLLFDRSANDEHERSILTKLKQQCGGQFTSKMEGMVTDLALARENQGHFEEYLSNNPIANPGIDLTVTVLTTGYWPSYKSSDLNLPAEMVRCVEVFKEYYHSKAQQRKLSWIYSLGNCNISGRFDSKTIELIVSTYQASVLLLFNNSDRLSFSEIMDQSNLGHDDLVRVLLSLSCAKYKILNKEPNTKTISPTDYFEFNSKFTDRMRRIKIPLPPVEERKKIVEDIDKDRRYAIDASIVRIMKSRKILSHQQLVTECVEQLSRLFKPDFKAIKKRIEDLISRDYLERDKENPNLYRYVA

SEQ ID NO: 13743 - DNA, 2409 bp, Vitis vinifera
  CDS (1)..(2409)
atgaaaaaagccaagtcccaggccgtggcttgctctctcgaccccaagaacggcctccagccaccaccccacccacctcctccctcttcccaccacttccctgacgacgacttcgacccctccgccatggcccttgacgatgatctcaagcccgacgatgccgacgccgcggcctgtagccgaccttcagctggtggtgtcaccgccaatttgtcccgtaaaaaggccacgcctcctcagcccgccaagaagcagcttgttatcaagctcctcaaagctaaaccaaccttacccacaaattttgaagaggatacatgggcaaagcttaagtcagctattagtgctatattcttgaagcaacctgatccctgtgacttggagaagctttatcaggctgttaatgatctctgcctccacaagatgggtggaaatctctatcaacggattgaaaaggagtgtgaatcacatatacgtgcagcattacaatctttggttggccaaagcccagacctggtggttttcctatcacttgttgagaaatgctggcaggacctttgcgatcagatgttgatgattcgtggtatagccttgtatcttgatagaacatatgtaaaacagactccaaatgtgcgttcgctctgggatatgggtttgcagcttttccgcaaacatctttctttatctccagaagttgagcacaaaactgtaactggtctcttgagaatgattgagagggaaagattaggtgaagcagtagataggactctccttaatcatcttttgaagatgtttactgctctaggaatttatttggaaagttttgagaagccattcctcgagtgtacgtctgaattttatgctgctgaaggcatgaaatacatgcagcaatcagatgttccggattacttgaaacatgtggagataaggttgcatgaagaacatgaaagatgcttactgtatctggatgcaagcacaagaaagcccctggtagcaactgcagaaagacaactccttgaacgccacatatctgcaattctagataagggtttcatgatgctgatggatggaaatcgaattgaggacctccagaggatgtatttactattttcaagggttaatgccctcgaatcactaagacaggcccttagctcttacatccgaagaaccgggcaaggaattgttatggatgaggaaaaagataaagatatggtttcctgcctgctggaatttaaggcttctcttgatacaatatgggaagaaagcttttcaaggaatgaagcattttgcaacaccataaaagatgcatttgaacatctcattaatctccgtcagaaccgacctgctgagcttattgcaaagtttctggatgagaaacttcgtgctgggaacaagggtacatctgaagaggagttggagggtacacttgataaagttttggttttattcaggtttatccagggtaaggatgtgttcgaagcattttacaagaaggatctggcaaaaaggctactgttggggaagagtgcatcaattgatgcagagaagtcaatgatcactaagttgaagactgaatgcggaagtcagtttactaacaaacttgaaggaatgtttaaggacattgaattatctaaagagataaatgagtccttcaaacaatcatcgcaagccaggacaaaacttccaacaggaattgagatgagtgttcatgtcttaacaactggatattggcctacttacccacctatggatgttcggctcccgcatgaattgaatgtatatcaggacattttcaaggagttctacttgagcaaatacagtgggaggcgattaatgtggcaaaactcattaggacactgtgttttgaaagcagagtttccaaaaggtaaaaaggagctggcagtttctctatttcagactgttgtcttgatgctgtttaatgatgcgcaaaagcttagctttcaagatattaaggactctactggcattgaggataaggagttgagaaggactctgcagtcccttgcatgtggaaaagttcgtgtccttcaaaagttgcctaaagggagggaagttgaggatgatgactcatttatgttcaatgaagggtttactgctcctctctaccgtataaaagtaaatgcaatccaaatgaaggaaacagtggaggagaacacaagcaccactgaaagagtgttccaggatcgtcaatatcaggttgatgctgctattgtccggataatgaagacgaggaaagttcttagtcacacactattgattactgaactctttcagcagctaaaatttccaataaagccagctgatttgaagaaaaggattgaaagcctcatcgacagggagtacctagagcgggacaaaaacaacccccagatatacaattacttggcataa

SEQ ID NO: 13744 - protein, 802 aa, Vitis vinifera
MKKAKSQAVACSLDPKNGLQPPPHPPPPSSHHFPDDDFDPSAMALDDDLKPDDADAAACSRPSAGGVTANLSRKKATPPQPAKKQLVIKLLKAKPTLPTNFEEDTWAKLKSAISAIFLKQPDPCDLEKLYQAVNDLCLHKMGGNLYQRIEKECESHIRAALQSLVGQSPDLVVFLSLVEKCWQDLCDQMLMIRGIALYLDRTYVKQTPNVRSLWDMGLQLFRKHLSLSPEVEHKTVTGLLRMIERERLGEAVDRTLLNHLLKMFTALGIYLESFEKPFLECTSEFYAAEGMKYMQQSDVPDYLKHVEIRLHEEHERCLLYLDASTRKPLVATAERQLLERHISAILDKGFMMLMDGNRIEDLQRMYLLFSRVNALESLRQALSSYIRRTGQGIVMDEEKDKDMVSCLLEFKASLDTIWEESFSRNEAFCNTIKDAFEHLINLRQNRPAELIAKFLDEKLRAGNKGTSEEELEGTLDKVLVLFRFIQGKDVFEAFYKKDLAKRLLLGKSASIDAEKSMITKLKTECGSQFTNKLEGMFKDIELSKEINESFKQSSQARTKLPTGIEMSVHVLTTGYWPTYPPMDVRLPHELNVYQDIFKEFYLSKYSGRRLMWQNSLGHCVLKAEFPKGKKELAVSLFQTVVLMLFNDAQKLSFQDIKDSTGIEDKELRRTLQSLACGKVRVLQKLPKGREVEDDDSFMFNEGFTAPLYRIKVNAIQMKETVEENTSTTERVFQDRQYQVDAAIVRIMKTRKVLSHTLLITELFQQLKFPIKPADLKKRIESLIDREYLERDKNNPQIYNYLA

SEQ ID NO: 13745 - DNA, 2235 bp, Vitis vinifera
  CDS (1)..(2235)
atgacgatgaatgagcggaagaccattgatttggagcaaggatgggagtttatgcagaaggggatcaccaaattgaagaacattctagaaggattacctgagccgcagtttagctcggaggactacatgatgctctatactaccatctataacatgtgtactcaaaagccccctcatgactactcccaacagctttatgacaaatatcgggaatcttttgaagagtacattactacgacggtattgccctctttaagagagaagcatgatgagttcatgttgagagaacttgtgaaaaggtggtcaaatcataaagttatggttagatggctttctcgtttcttccattatcttgatagatattttattgctcggaggtcacttcctgcccttaacgaggttgggctcacttgcttccgtgatctggtctaccaagagttatatagtaaagtcagggatgccgtgatttctctgattgatcaagagcgcgagggagagcagattgaccgagctttattgaagaatgttttagatatatttgttgaaattggaatggggcaaatggagcaatatgaaaatgattttgaagcagccatgctcaaagatactgctgcatattattctcgaaaggcttcaaactggatcctggaagattcatgtccagattatatgttaaaagctgaggagtgtttgaaacgagagaaagatagggtttctcattatctacattctagtagtgaaccaaagctacttgagaaagtccagaatgagttgctgtcggtatttgcaaaccaactgcttgagaaggagcactctgggtgccatgcgttgcttagagatgacaaggtggatgatttatcaaggatgtacaggctcttttctaaaataccacgcggtttggagcctgtgtctaatatatttaagcagcatgttactgccgaaggtacagccttggttaaacaagctgaagatgcagcaagcaacaagaaggcagataaaagggatgtggtcggcttgcaagaacaggtttttgttagaaaagtaattgagctccatgacaagtatctggcatatgtgaatgattgttttaataaccacacactttttcacaaggcactcaaggaggcttttgaggtcttctgcaacaagggtgttgctggaagctcaagtgctgaactactagccactttttgtgataatattcttaagaaaggtgggagtgagaaactgagcgatgaggccattgaggaaacacttgagaaggtagtaaagctgcttgcttatattagtgataaagatctatttgctgagttctataggaaaaagcttgctcggcgacttctttttgacaagagtgctaatgatgaccatgagagaagtattttgactaagctgaagcagcaatgtggtggtcagttcacctccaagatggaggggatggttacagatttgacattggcaagggaaaatcaaacccactttgaggagtatctgagcaataatccaaatgctaatcctgggattgacttgactgttactgtgcttactacgggcttctggccaagttataagtcttttgatctcaaccttcctgcagagatggttaagtgtgttgaagtttttagggaattctatcaaacaaaaaccaagcacagaaaacttacatggatatactcattgggtacttgtaatatcaatggaaaatttgaaccaaaaactatggagttgattgtgacaacctatcaggcttctgccttgctgctattcaatgcctccgatagattgagctattcagaaatcatgacgcagctaaacttgactgatgatgatgttgttagactgctccattccttgtcctgtgcaaagtataagatcttaaataaagaaccaaacacaaaaacaatctctccaactgattactttgagttcaactccaagtttacggacaaaatgaggaggatcaagattcctcttcctcctgtggatgagaagaagaaagtgattgaagatgttgataaggacaggcggtatgccattgatgcatcaattgtgcgcatcatgaagagtcggaaagttttgggtcaccaacagttggttatggaatgtgtcgaacagttaggccgcatgttcaagcctgatttcaaagcaatcaagaagcggattgaagacctgatcactagggactatctggaaagggacaaggataatccgaacacattcagatacttggcatga

SEQ ID NO: 13746 - protein, 744 aa, Vitis vinifera
MTMNERKTIDLEQGWEFMQKGITKLKNILEGLPEPQFSSEDYMMLYTTIYNMCTQKPPHDYSQQLYDKYRESFEEYITTTVLPSLREKHDEFMLRELVKRWSNHKVMVRWLSRFFHYLDRYFIARRSLPALNEVGLTCFRDLVYQELYSKVRDAVISLIDQEREGEQIDRALLKNVLDIFVEIGMGQMEQYENDFEAAMLKDTAAYYSRKASNWILEDSCPDYMLKAEECLKREKDRVSHYLHSSSEPKLLEKVQNELLSVFANQLLEKEHSGCHALLRDDKVDDLSRMYRLFSKIPRGLEPVSNIFKQHVTAEGTALVKQAEDAASNKKADKRDVVGLQEQVFVRKVIELHDKYLAYVNDCFNNHTLFHKALKEAFEVFCNKGVAGSSSAELLATFCDNILKKGGSEKLSDEAIEETLEKVVKLLAYISDKDLFAEFYRKKLARRLLFDKSANDDHERSILTKLKQQCGGQFTSKMEGMVTDLTLARENQTHFEEYLSNNPNANPGIDLTVTVLTTGFWPSYKSFDLNLPAEMVKCVEVFREFYQTKTKHRKLTWIYSLGTCNINGKFEPKTMELIVTTYQASALLLFNASDRLSYSEIMTQLNLTDDDVVRLLHSLSCAKYKILNKEPNTKTISPTDYFEFNSKFTDKMRRIKIPLPPVDEKKKVIEDVDKDRRYAIDASIVRIMKSRKVLGHQQLVMECVEQLGRMFKPDFKAIKKRIEDLITRDYLERDKDNPNTFRYLA

SEQ ID NO: 13747 - DNA, 2160 bp, Vitis vinifera
  CDS (1)..(2160)
atgacgatgaatgagcggaagaccattgatttggagcaaggatgggataccatctataacatgtgtactcaaaagccccctcatgactactcccaacagctttatgacaaatatcgggaatcttttgaagagtacattactacgacggtattgccctctttaagagagaagcatgatgagttcatgttgagagaacttgtgaaaaggtggtcaaatcataaagttatggttagatggctttctcgtttcttccattatcttgatagatattttattgctcggaggtcacttcctgcccttaacgaggttgggctcacttgcttccgtgatctggtctaccaagagttatatagtaaagtcagggatgccgtgatttctctggtatctttattgaatcagattgatcaagagcgcgagggagagcagattgaccgagctttattgaagaatgttttagatatatttgttgaaattggaatggggcaaatggagcaatatgaaaatgattttgaagcagccatgctcaaagatactgctgcatattattctcgaaaggcttcaaactggatcctggaagattcatgtccagattatatgttaaaagctgaggagtgtttgaaacgagagaaagatagggtttctcattatctacattctagtagtgaaccaaagctacttgagaaagtccagaatgagttgctgtcggtatttgcaaaccaactgcttgagaaggagcactctgggtgccatgcgttgcttagagatgacaaggtggatgatttatcaaggatgtacaggctcttttctaaaataccacgcggtttggagcctgtgtctaatatatttaagcagcatgttactgccgaaggtacagccttggttaaacaagctgaagatgcagcaagcaacaagaaggcagataaaagggatgtggtcggcttgcaagaacaggtttttgttagaaaagtaattgagctccatgacaagtatctggcatatgtgaatgattgttttaataaccacacactttttcacaaggcactcaaggaggcttttgaggtcttctgcaacaagggtgttgctggaagctcaagtgctgaactactagccactttttgtgataatattcttaagaaaggtgggagtgagaaactgagcgatgaggccattgaggaaacacttgagaaggtagtaaagctgcttgcttatattagtgataaagatctatttgctgagttctataggaaaaagcttgctcggcgacttctttttgacaagagtgctaatgatgaccatgagagaagtattttgactaagctgaagcagcaatgtggtggtcagttcacctccaagatggaggggatggttacagatttgacattggcaagggaaaatcaaacccactttgaggagtatctgagcaataatccaaatgctaatcctgggattgacttgactgttactgtgcttactacgggcttctggccaagttataagtcttttgatctcaaccttcctgcagagatggttaagtgtgttgaagtttttagggaattctatcaaacaaaaaccaagcacagaaaacttacatggatatactcattgggtacttgtaatatcaatggaaaatttgaaccaaaaactatggagttgattgtgacaacctatcaggcttctgccttgctgctattcaatgcctccgatagattgagctattcagaaatcatgacgcagctaaacttgactgatgatgatgttgttagactgctccattccttgtcctgtgcaaagtataagatcttaaataaagaaccaaacacaaaaacaatctctccaactgattactttgagttcaactccaagtttacggacaaaatgaggaggatcaagattcctcttcctcctgtggatgagaagaagaaagtgattgaagatgttgataaggacaggcggtatgccattgatgcatcaattgtgcgcatcatgaagagtcggaaagttttgggtcaccaacagttggttatggaatgtgtcgaacagttaggccgcatgttcaagcctgatttcaaagcaatcaagaagcggattgaagacctgatcactagggactatctggaaagggacaaggataatccgaacacattcagatacttggcatga

SEQ ID NO: 13748 - protein, 719 aa, Vitis vinifera
MTMNERKTIDLEQGWDTIYNMCTQKPPHDYSQQLYDKYRESFEEYITTTVLPSLREKHDEFMLRELVKRWSNHKVMVRWLSRFFHYLDRYFIARRSLPALNEVGLTCFRDLVYQELYSKVRDAVISLVSLLNQIDQEREGEQIDRALLKNVLDIFVEIGMGQMEQYENDFEAAMLKDTAAYYSRKASNWILEDSCPDYMLKAEECLKREKDRVSHYLHSSSEPKLLEKVQNELLSVFANQLLEKEHSGCHALLRDDKVDDLSRMYRLFSKIPRGLEPVSNIFKQHVTAEGTALVKQAEDAASNKKADKRDVVGLQEQVFVRKVIELHDKYLAYVNDCFNNHTLFHKALKEAFEVFCNKGVAGSSSAELLATFCDNILKKGGSEKLSDEAIEETLEKVVKLLAYISDKDLFAEFYRKKLARRLLFDKSANDDHERSILTKLKQQCGGQFTSKMEGMVTDLTLARENQTHFEEYLSNNPNANPGIDLTVTVLTTGFWPSYKSFDLNLPAEMVKCVEVFREFYQTKTKHRKLTWIYSLGTCNINGKFEPKTMELIVTTYQASALLLFNASDRLSYSEIMTQLNLTDDDVVRLLHSLSCAKYKILNKEPNTKTISPTDYFEFNSKFTDKMRRIKIPLPPVDEKKKVIEDVDKDRRYAIDASIVRIMKSRKVLGHQQLVMECVEQLGRMFKPDFKAIKKRIEDLITRDYLERDKDNPNTFRYLA

SEQ ID NO: 13749 - DNA, 2202 bp, Vitis vinifera
  CDS (1)..(2202)
atgggcagtcagaagaagaggaattttcaaatagaggcgttcaagcatcgggtggtggtggatcccaagtacgccgacaagacttggaagatattggagcatgcaatccatgagatatataatcacaacgctagtggtcttagttttgaagagctttataggaatgcttacaatatggtactgcacaaatttggtgagaagttgtactcagggctggtttcaactatgacttcacatctcaaagacatatcaaagtttatagaggctgctcagggaggtttgtttctggaggagctgaatagaaagtgggcagatcataacaaggcattgcaaatgatacgagacatactaatgtacatggacaggactttcataccaagtactcataaaacccctgttcatgagcttgggctgaatctgtggagggacaacattatccactccagcaaaatccaaacaaggctactaaatacactccttgaactagtactcagagaacgtaatggtgaagtcataaaccgtggactgatgaggaatataattaaaatgctaatggatttgggttcttctgtctatcaggaagactttgaaaagcctttccttgaggtttcagctgatttctacagggttgagtctcagaagtttattgagtgctgtgattgtgcagactacctgaagaaagctgaaagacggctaaacgaagaaatggaaagggtatcccagtacttggatgccaagagtgaagtcaagatcactaatgtggtggagaaggagatgattgcaaaccacatgctgaggctagttcatatggagaactcaggtttggtaaacatgcttcttgatgataaatatgatgacctaggaagaatgtacaacttgttccgccgggttccaaatggcctttcaacaatacgagaggtgatgacctctcatatcagggacactggtaagcatcttgttactgatcctgaaaggttgagggatcctgtagaatttgttcaacgcctcttggatgaaaaagataagtacgatagaatcataggctcatcatttaacaatgacaaaacattccagaatgctttgacttcctcttttgaatacttcattaatttgaaccctcgttctcctgagttcatttcattatttgtggatgacaaactccgcaaaggcctgaagggggttagtgaggaggatgtggagattatccttgataaggtgatgatgctgttccgctacttgcaggagaaagacgtatttgagaagtattataaacagcatttggcaaaacgactcctgtctggaaaaactgtttctgatgatgcagagagaagtctgatagttaagctcaagacagagtgtgggtaccaatttacttgcaaattagaaggcatgtttaccgacatgaaaacctctcaggataccatgcaaggatttaattcagcccatggtgctgacttaggggatggccctacgctggctgtcaccgttttgacaacagggtcttggcctactcagcccagcatcacctgcaacctgcctactgaaatgttggctctctgtgagaagttccggtcatattaccttgggacccatactggtcggagattgacctggcaaactaacatgggaacagctgatataaaagcaacttttgctaagggccagaagcatgagctacacgtgtccacttaccaaatgtgtgttcttatgctgtttaacaatgctgatcggctaagctacaaggagattgagcaggcaacagagatccctgcttcagatttgaagaggtgcatgcaatccatggcttgtgtaaaaggtaaaaatgttcttcggaaagagcccatgagcaaagatattggtgaagatgatgtatttttcgttaatgacaaattcactaataaactctataaggtgaagataggaactgtagttgcacaaaaggaaacagagcctgaaaaacaggaaaccaggcaaagagtagaggaggataggaagccacagattgaggctgccatagtgaggatcatgaaatcgaggagggtactggatcataacaatcttattgctgaggtgacaaagcagttgcagtctcggttcctggccaatcctgtagaaattaaaaaacggatcgagtcccttattgaacgtgatttcttggagagagacaatgtggataggaagttgtaccgataccttgcctga

SEQ ID NO: 13750 - protein, 733 aa, Vitis vinifera
MGSQKKRNFQIEAFKHRVVVDPKYADKTWKILEHAIHEIYNHNASGLSFEELYRNAYNMVLHKFGEKLYSGLVSTMTSHLKDISKFIEAAQGGLFLEELNRKWADHNKALQMIRDILMYMDRTFIPSTHKTPVHELGLNLWRDNIIHSSKIQTRLLNTLLELVLRERNGEVINRGLMRNIIKMLMDLGSSVYQEDFEKPFLEVSADFYRVESQKFIECCDCADYLKKAERRLNEEMERVSQYLDAKSEVKITNVVEKEMIANHMLRLVHMENSGLVNMLLDDKYDDLGRMYNLFRRVPNGLSTIREVMTSHIRDTGKHLVTDPERLRDPVEFVQRLLDEKDKYDRIIGSSFNNDKTFQNALTSSFEYFINLNPRSPEFISLFVDDKLRKGLKGVSEEDVEIILDKVMMLFRYLQEKDVFEKYYKQHLAKRLLSGKTVSDDAERSLIVKLKTECGYQFTCKLEGMFTDMKTSQDTMQGFNSAHGADLGDGPTLAVTVLTTGSWPTQPSITCNLPTEMLALCEKFRSYYLGTHTGRRLTWQTNMGTADIKATFAKGQKHELHVSTYQMCVLMLFNNADRLSYKEIEQATEIPASDLKRCMQSMACVKGKNVLRKEPMSKDIGEDDVFFVNDKFTNKLYKVKIGTVVAQKETEPEKQETRQRVEEDRKPQIEAAIVRIMKSRRVLDHNNLIAEVTKQLQSRFLANPVEIKKRIESLIERDFLERDNVDRKLYRYLA

SEQ ID NO: 13751 - DNA, 2202 bp, Vitis vinifera
  CDS (1)..(2202)
atgagtactcagaagaagaggaattttcagatagaggcgtttaagcaccgggttgtggtggatccgaagtatgcagagaagacttggaagattctggaacatgcaatccatgagatatacaatcataatgccagtgggcttagtttcgaagaactgtacaggaatgcttacaatatggtgctgcacaaatttggagagaaactctactctggactagttacaactatgactcatcatttggaagttatatcaaaatcgattgaagctgctcaaggaggattgtttttggaagaactgaataggaaatgggcagaccataacaaggcattgcaaatgatccgagacatattgatgtacatggacaggactttcattccaagtactcacaagaccccagttcatgaacttggtttgaatttgtggagggacaatatcatccattctgccaaaatccagacaaggcttcaagatacgcttcttgatctcgtgctgagagagaggactggtgaggtaataaatagaggcttgatgaggaatgttataaagatgctaatggatttaggttcttctgtttatcaagatgactttgagaaacattttcttgaggtctcagctgatttttaccgtgcagagtctcagcagttcattgagtgctgtgattgtggtgaatatttgaagaaagctgagagacgtttaaatgaagaaatggagagagtgtcccattacttggatgccaaaagtgaagccaagataactagtgttgtggaaaaggagatggttgaaagtcacatgcagagactagtccatatggagaactcaggtttgattaatatgcttgtggatgacaaatatgaagatttgggaaggatgtatagcttgtttcgcagggtgcctaatgggctatttataataagagatgtcatgacttcccacatcaggagtactggtaagcagcttgttactgatccggaaaggttaaaggatcctgtagactttgtacagcgactcttggatgagaaggataaaaatgataagataatcaatttggcatttaataatgacaagacatttcagaatgctttaaattcctcttttgagtacttcattaatttgaattctcgctccccggaatttatttctttgttcgtggatgacaagcttcggaaaggactgaagggggtcagtgaggaggatgtggaaattgttctagacaaggtgatgatgcttttccgatacctccaagagaaagatgtgtttgagaaatactacaagcaacacttggcaaagaggcttctgtcaggaaaaactgtctctgatgatgctgagagaagtctgatagttaagctcaaaacagaatgtggatatcagtttacttcaaaattagaaggcatgttcactgacatgaagacatcggaggacacaatgcagggtttctatgcaagctcatttgctgaaacaggggatggccctacacttgctgtccaggttctcaccacagggtcttggccaactcagccaagtgctacgtgtaaccttccagcagaaatcctgggagtgtgtgagaagtttcgaggctattatcttgggacccacactgggaggagattgtcttggcaaacaaatatgggtacggctgatttgaaggcaacatttggcaggggccagaagcatgaactgaatgtttccacacatcagatgtgtgctctgatgctgttcaataatgctgatcgcttgagttataaagaaatagagcaagctacagagatccctgcctcagacttgaagaggtgcctgcagtctatggcctgtgttaagggaaagaatattctcaggaaggagcccatgagtaaggacatagctgaggatgatgcattttttgtcaatgacaagttctcaagcaagttttacaaggtgaagataggtactgtagttgcacaaagagagtctgaaccagaaaatcaagagactaggcagagagtggaggaggacaggaagccccagattgaggctgcaatagtgagaatcatgaagtctaggcgggtgctagatcacaacaatattgtggccgaggtcacaaagcagctgcagtcaaggtttctgcccagccctgttttgattaagaagcgaatagagtcccttattgagcgggagtttctagagagggacaaagtggacaggaaattatatcgatatcttgcttga

SEQ ID NO: 13752 - protein, 733 aa, Vitis vinifera
MSTQKKRNFQIEAFKHRVVVDPKYAEKTWKILEHAIHEIYNHNASGLSFEELYRNAYNMVLHKFGEKLYSGLVTTMTHHLEVISKSIEAAQGGLFLEELNRKWADHNKALQMIRDILMYMDRTFIPSTHKTPVHELGLNLWRDNIIHSAKIQTRLQDTLLDLVLRERTGEVINRGLMRNVIKMLMDLGSSVYQDDFEKHFLEVSADFYRAESQQFIECCDCGEYLKKAERRLNEEMERVSHYLDAKSEAKITSVVEKEMVESHMQRLVHMENSGLINMLVDDKYEDLGRMYSLFRRVPNGLFIIRDVMTSHIRSTGKQLVTDPERLKDPVDFVQRLLDEKDKNDKIINLAFNNDKTFQNALNSSFEYFINLNSRSPEFISLFVDDKLRKGLKGVSEEDVEIVLDKVMMLFRYLQEKDVFEKYYKQHLAKRLLSGKTVSDDAERSLIVKLKTECGYQFTSKLEGMFTDMKTSEDTMQGFYASSFAETGDGPTLAVQVLTTGSWPTQPSATCNLPAEILGVCEKFRGYYLGTHTGRRLSWQTNMGTADLKATFGRGQKHELNVSTHQMCALMLFNNADRLSYKEIEQATEIPASDLKRCLQSMACVKGKNILRKEPMSKDIAEDDAFFVNDKFSSKFYKVKIGTVVAQRESEPENQETRQRVEEDRKPQIEAAIVRIMKSRRVLDHNNIVAEVTKQLQSRFLPSPVLIKKRIESLIEREFLERDKVDRKLYRYLA

SEQ ID NO: 13753 - DNA, 2169 bp, Populus trichocarpa
  CDS (1)..(2169)
atgcagaatgggatctcaaagctgaaggggatcctggatggatcactagagcaattcagctctgaagaatatatgatgctttacacaactatctacaatatgtgtactcagaagccaccaaatgactattctcaacagctttatgacaagtataaggaagcttttcaagtatatattaactccacggtattaccatcaataagggagaaacatgatgagtttatgctgagggagcttgtaaaaagatgggttaatcataaaattatggttaggtggttgtcacgcttcttcaattatcttgaccgttacttcattgctcggaggtcacttccaccacttaatgaagttggactgacttgcttccgtgatctggtttatcaggaagtgcatagtcaagccaaggatgctgtgcttgatgtgattggtaaagaacgtgatggggaacagatagacagagcactgctaaagaatgttttagatatatacgttgagattggaatgtcacaaatggatcattatgcagatgattttgaagcacacatgcttcaaggtactggtgcttactattctgttaaagcagcaaactggattcgagaggattcttgtccagattacatgataaaggcaagaacttatttgcatggagagagagatagagtttctcactacttgcattcaagcagtgagataaaattagtagagaaagtgcaacatgagttattggtggtcaatgcaaatcaactgctagagaaggaacattctggagttcgtgcattgctcagagatgacaaggtggaagatctatccaggatgtttaggctttatcataaggttacccgtggcttggaacctgtttctaatgtattcaagcagcatattactgctgaaggaacagccttgatccagcaggcagaagacgctgcgagtagccaggctgcaaatggtggtgttcaggaacaagttctcattcgaaagataattgagctgcatgataaatacatgacttatgtgactgcttgttttcaaaaccacacgttgtttcacaaggccatgaaagaggcttttgagatcttttgcaataaaacagttgctgggagctcaagtgctgaactactggcaaccttttgtgacactatcctccgaaagggtggaagtgagaaactaagtgacgaagccattgaagaaacactggagaaggtggttaagctgcttgcatttattagtgacaaggacctttttgctgaattttataggaaaaaacttgcccgtcgacttctttttgatcggagtgctaatgatgaacatgaaaggagtatactgtcaaaattgaagcagcaatgtggtggacaatttacctcaaagatggaaggaatggtcacagatttgcaattggcaaaggaacatcagtccagctttgatgagtatcttgccaataacccatccacacgtccggggattgatttgcaagtaaatgttctcacaactgggtactggccaacgtataaatcctctgatatcaacctacctgcagaaatggctaggggagtggaagttttcaaggagttctatgacctgaagagcaagcacagaaaactaacatggatttactctttgggatcttgccacattaatgccaagtttgaccaaaaaactattgagctggttgtgacgacctaccaggcttgtctcctgatgctttttaatacttcagacaaactcagttactcagagattatgacccagtcaaacttgagtgatgatgacttgcctagattgcttcattccctgtcatgtggcaagtataaaatccttagcaaggagccaaacacaaagactgttaaccaaaatgattactttgagttcaatcacaagttcaatgataggatgaggaggatcaaggttcctcttccacttgttgatgaaagaaagaaggttgttgaagatgtcgacaaagacagacggtatgctattgatgctgcaattgtgcgcatcatgaagagtcggaaagtgttgggtcatcaacagcttgtcttggagtgtgttgagcagttgaatctcatgttcaagcctgacattaaagctatcaagaagcggatagaagatctgatctcccgagattatttagaaagagacaaggaaaacccaaacatgtttaagtacctggcttga

SEQ ID NO: 13754 - protein, 722 aa, Populus trichocarpa
MQNGISKLKGILDGSLEQFSSEEYMMLYTTIYNMCTQKPPNDYSQQLYDKYKEAFQVYINSTVLPSIREKHDEFMLRELVKRWVNHKIMVRWLSRFFNYLDRYFIARRSLPPLNEVGLTCFRDLVYQEVHSQAKDAVLDVIGKERDGEQIDRALLKNVLDIYVEIGMSQMDHYADDFEAHMLQGTGAYYSVKAANWIREDSCPDYMIKARTYLHGERDRVSHYLHSSSEIKLVEKVQHELLVVNANQLLEKEHSGVRALLRDDKVEDLSRMFRLYHKVTRGLEPVSNVFKQHITAEGTALIQQAEDAASSQAANGGVQEQVLIRKIIELHDKYMTYVTACFQNHTLFHKAMKEAFEIFCNKTVAGSSSAELLATFCDTILRKGGSEKLSDEAIEETLEKVVKLLAFISDKDLFAEFYRKKLARRLLFDRSANDEHERSILSKLKQQCGGQFTSKMEGMVTDLQLAKEHQSSFDEYLANNPSTRPGIDLQVNVLTTGYWPTYKSSDINLPAEMARGVEVFKEFYDLKSKHRKLTWIYSLGSCHINAKFDQKTIELVVTTYQACLLMLFNTSDKLSYSEIMTQSNLSDDDLPRLLHSLSCGKYKILSKEPNTKTVNQNDYFEFNHKFNDRMRRIKVPLPLVDERKKVVEDVDKDRRYAIDAAIVRIMKSRKVLGHQQLVLECVEQLNLMFKPDIKAIKKRIEDLISRDYLERDKENPNMFKYLA

SEQ ID NO: 13755 - DNA, 2199 bp, Populus trichocarpa
  CDS (1)..(2199)
atgagcaatcagaagaagaggaatttccagatagatgcgtttaagcaccgggtggtggtggatccgaaatacgccgataagacttggaagatcctggagcacgcaatccatgaaatctacaatcataatgctagtggtctcagttttgaagagctctacaggaacgcctacaatatggtgctacacaaatttggtgagaagttgtataatggtctggttgcgactatgacttcacatctaaaagaaatatcaaaatctatcgaggctgctcagggagattcatttttggaggagctgaacaggaaatggaatgatcataacaaagcattgcaaatgatcagagacatattgatgtatatggacaggacatatatcccaagtgtgcataaaacccctgttcatgaacttgggcttaacttgtggagggataatataatacactcgagcaaaattcagacacggcttcaaaacacacttcttgaactagttcatagggaacggactggcgaagttattgaccgagggttgatgaggaacattgtcaagatgctaatggatttaggttcttctgtttaccaagaagactttgagaagccatttcttgaggtttctgctgagttttacagtggcgaatctcagaagttcattgagtgctgtgattgtggtgattatctaaagaaagctgagaaacgtttaaatgaagagatagagagagtgacccattatttggattccaagagtgaagtcaggataaataatgtggtggagaaggagatgattgctaatcacatgctgagattagtccacatggagaattcaggcttggtaaatatgcttcttgatgataaatttgatgacttgggacggatgtacaacctgttccgccgggttcctgatggtctttcaacaataagagaagtgatgacttctcaccttagggagactggcaagcaacttgttactgatccagaaaggttgaaggatccagtggagtttgttcagtgtttgttggatgaaaaagataagtacgatagcatcataagcaatgcatttaacaatgacaagacattccagaatgctctgaactcctcttttgaatatttcattaacttgaatactcgttctcccgagttcatttcactgtttgtggatgacaaacttcgcaaaggtctaaaaggagttagtgaggaggatgtggagatcattcttgacaaggtgatgatgctgttccgctatttgcaggagaaagatgtgtttgaaaagtattacaagcagcatttggctaagcggctgctgtcagggaaaacagtctctgatgatgcagagagaagtctgatagtcaaacttaagacagaatgtggttaccagttcacttcaaaattagaaggcatgtttacagacatgaaaacctcccaggatacaatgcaaggtttttatgcaagccacccggagctgggggatggaccaacactggttgtccaggttttgacaacagggtcttggcccactcaacctggtgttccatgcaacttgcctgcagaaatgtcagcactatgtgagaagttcaggtcatattaccttgggacccatactggtcggagattgtcatggcaaactaacatgggcacagcggacattaaggcaaccttcgggaagggtcagaagcatgaattgaatgtctccacttaccagatgtgcgttctcatgctgtttaataatgctgatagacttggctacaaagagattgagcaggcaactgagattcctacagcagacttgaaaaggtgcctgcaatccatggcttgtgtgaagggaaagaatgttcttcgcaaagaacccatgagtaaagacattggtgaggaagatgctttttttgttaatgacaaattcacaagcaaattctataaggtgaagattggaactgtagttgcgcaaaaggaatcagaacctgaaaagcaggagactcggcagagagtagaggaggaccgaaagcctcagatagaagctgcagtagttaggattatgaagtcaaggagggtattggatcacaacaatataatcactgaggtcacaaagcagttgcagtcacgtttcctagcgaaccccacagaaattaagaaacggattgaatcccttattgaacgggatttcttggagagggatagtgtggacagaaaactgtatcgatatcttgcttaa

SEQ ID NO: 13756 - protein, 732 aa, Populus trichocarpa
MSNQKKRNFQIDAFKHRVVVDPKYADKTWKILEHAIHEIYNHNASGLSFEELYRNAYNMVLHKFGEKLYNGLVATMTSHLKEISKSIEAAQGDSFLEELNRKWNDHNKALQMIRDILMYMDRTYIPSVHKTPVHELGLNLWRDNIIHSSKIQTRLQNTLLELVHRERTGEVIDRGLMRNIVKMLMDLGSSVYQEDFEKPFLEVSAEFYSGESQKFIECCDCGDYLKKAEKRLNEEIERVTHYLDSKSEVRINNVVEKEMIANHMLRLVHMENSGLVNMLLDDKFDDLGRMYNLFRRVPDGLSTIREVMTSHLRETGKQLVTDPERLKDPVEFVQCLLDEKDKYDSIISNAFNNDKTFQNALNSSFEYFINLNTRSPEFISLFVDDKLRKGLKGVSEEDVEIILDKVMMLFRYLQEKDVFEKYYKQHLAKRLLSGKTVSDDAERSLIVKLKTECGYQFTSKLEGMFTDMKTSQDTMQGFYASHPELGDGPTLVVQVLTTGSWPTQPGVPCNLPAEMSALCEKFRSYYLGTHTGRRLSWQTNMGTADIKATFGKGQKHELNVSTYQMCVLMLFNNADRLGYKEIEQATEIPTADLKRCLQSMACVKGKNVLRKEPMSKDIGEEDAFFVNDKFTSKFYKVKIGTVVAQKESEPEKQETRQRVEEDRKPQIEAAVVRIMKSRRVLDHNNIITEVTKQLQSRFLANPTEIKKRIESLIERDFLERDSVDRKLYRYLA

SEQ ID NO: 13757 - DNA, 2229 bp, Populus trichocarpa
  CDS (1)..(2229)
atgaatgagcggaagactattgatcttgaacaaggatgggagtttatgcagaagggaattactaagctgaagaacatcctagaagggttgtctgagccccagttcagctccgaggactacatgatgctatacacaaccatttacaacatgtgtacgcagaagcctcctcatgattattcccaacagctatatgacaagtaccgggagtcttttgaagaatacattacttcaacggtattgccatccttaagggagaagcatgatgagtttatgttacgagagctagttaaaaggtgggcaaaccataaagtcatggttaggtggctttctcgtttcttccattaccttgatcgctattttattgcccgaaggtcacttccaccccttaatgaagttggacttgcttgtttccgcaatcaggtgtaccaagagctgaatgggaaagtgagggatgctgtaatttctctgattgatcaagagcgtgaaggagagcagattgaccgagctttattgaagaatgtcttggatatatttgttgaaatcggaatggggcagatggattattatgaaaatgactttgaagcagcgatgcttaaagatacagctgcttattattctcggaaagcagcaaactggatcctagatgattcatgtccagattacatgttaaaggctgaggagtgtctaatgagggagaaagatagggtttctcattacttgcattccagtagtgagccaaaattgctggagaaagttcaacatgaggagttgtctgtatatgccaaccagctgcttgaaaaagagcactctggatgtcatgcactgcttagagatgacaaggtggaggatttatcaagaatgttcaggctcttttctaaaatacctcgaggcttagatcctgtttctagtatatttaagcagcatgtcactgctgaaggtacagctttggtcaaacaggctgaagatgcagcaagcagcaagaaggcagataaaaaggacgtggttggcttgcaggaacaggtttttgtcaggaaggtgattgagctgcacgacaaatatctggcatatgtcaacaattgttttcagaaccacactcttttccacaaggccctcaaggaagcttttgaggtcttttgcaacaagggtgttgctggaagttcaagtgcagaattactagcaaccttttgtgataacattcttaagaaaggtgggagtgagaaactgagtgacgaggccattgaggaaacactggagaaggttgtgaagctgcttgcttatattagcgacaaagacttgtttgctgaattttataggaaaaagcttgctcgacgtctactttttgataagagtgccaatgatgaccatgagagaagcattttgacaaagctgaagcagcaatgtggtgggcagttcacctcaaagatggagggaatggttacggacttgacattagctcgggaaaaccaaaccagttttgaggagtatctaagcaacaacccaaatgcaaatccaggaattgacttgacggttacggttttgacaactggcttctggcctagttacaagtcttttgatttgaaccttccagcggagatggtcaagtgtgttgaagtttttagagaattttatcaaataaaaacaaagcacaggaaacttacctggatatactcattgggtacctgtaatcttattgggaaatttgaaccaaaaaccatggagttgattgtgacaacctatcaggcttctgcactgttgctttttaactcttcagatagattgagttattcagagatcatgactcaattgaacttgactgatgatgatgttgttagactgctccactctttgtcatgcgcaaagtataagattctaaacaaagagccaaatacaaaaacaatatctcctaccgatcactttgaattcaactccaaatttactgacaaaatgaggaggatcaagattcctctgcctcctgtagatgaaaagaagaaagtaattgaagatgttgataaggacagaaggtatgcaattgatgcatcaattgtgcgcatcatgaagagccgcaaagttttgggtcaccagcaattggttatggagtgtgttgagcagttgggtcgcatgttcaagcctgatttcaaggcaattaaaaaacggattgaagatctgattactcgagactatcttgaaagggacaaagaaaaccccaatttgttcagatacttggcataa

SEQ ID NO: 13758 - protein, 742 aa, Populus trichocarpa
MNERKTIDLEQGWEFMQKGITKLKNILEGLSEPQFSSEDYMMLYTTIYNMCTQKPPHDYSQQLYDKYRESFEEYITSTVLPSLREKHDEFMLRELVKRWANHKVMVRWLSRFFHYLDRYFIARRSLPPLNEVGLACFRNQVYQELNGKVRDAVISLIDQEREGEQIDRALLKNVLDIFVEIGMGQMDYYENDFEAAMLKDTAAYYSRKAANWILDDSCPDYMLKAEECLMREKDRVSHYLHSSSEPKLLEKVQHEELSVYANQLLEKEHSGCHALLRDDKVEDLSRMFRLFSKIPRGLDPVSSIFKQHVTAEGTALVKQAEDAASSKKADKKDVVGLQEQVFVRKVIELHDKYLAYVNNCFQNHTLFHKALKEAFEVFCNKGVAGSSSAELLATFCDNILKKGGSEKLSDEAIEETLEKVVKLLAYISDKDLFAEFYRKKLARRLLFDKSANDDHERSILTKLKQQCGGQFTSKMEGMVTDLTLARENQTSFEEYLSNNPNANPGIDLTVTVLTTGFWPSYKSFDLNLPAEMVKCVEVFREFYQIKTKHRKLTWIYSLGTCNLIGKFEPKTMELIVTTYQASALLLFNSSDRLSYSEIMTQLNLTDDDVVRLLHSLSCAKYKILNKEPNTKTISPTDHFEFNSKFTDKMRRIKIPLPPVDEKKKVIEDVDKDRRYAIDASIVRIMKSRKVLGHQQLVMECVEQLGRMFKPDFKAIKKRIEDLITRDYLERDKENPNLFRYLA

SEQ ID NO: 13759 - DNA, 2202 bp, Populus trichocarpa
  CDS (1)..(2202)
atgagcaatcaaaagaagaggaatttccagatagaggcgtttaaacaccgggtcgtggtggatccgaaatacgccgataagacctggaagattttggagcacgctatccatgagatttacaatcataatgctagtggtctcagtttcgaagagctctatagaaatgcctacaacatggtgctccacaaatttggcgagaagttgtataatggtctggttgctactatgacttcacatttaagagaaatatcaaaatctgttgaggctgctcaaggggattcgttcttggaggagctgaacaggaaatggaatgatcataacaaagcattgcaaatgatcagggacatattgatgtatatggatagaacatatattccaagtacgcataaaacccctgttcatgaacttgggcttaacttgtggagggataacataatacactccagcaaaattcagacaaggcttcaaaatacacttcttgaactggttcacagggaacggactggtgaagttattgaccgaggtttgatgaggaacattgtcaagatgctaatggatctaggctcttctgtttaccaagaagactttgagaagccatttcttgaggtttcagccgagttttataggggtgaatctcagaagttcattgagtgctgtgattgtggtgattatctgaagaaagctgagaaacgtttaaatgaagagatagagagagtgactcattatttggattccaagagtgaagtcaagataactaatgtggtggagaaggagatgattgctaaccacatgctgagactagtccacatggagaattcaggcttggtaaacatgcttcttgatgataaatatgaagacttgggacggatgtacaacctgttccgccgggttcctaatggtctttcaacaataagagaagtgatgacttctcacctcagggagactggcaagcaacttgttactgatccagaaaggttgaaggatccagtggaatttgttcagcgtttgttggatgaaaaagacaagtacgatagcatcataagcaatgcatttaacaatgacaagacattccagaatgctttgaactcctcttttgaatatttcattaatttgaatgctcgttctcctgagttcatttcattgttcgtggatgacaaactacgcaaaggtctaaaaggagttagtgaggaggatgtggagatcattcttgacaaggtgatgatgctgttccgctatttgcaggagaaagatgtattcgaaaagtattacaagcagcatttggctaagcggctgttgtcagggaaaacggtctctgatgatgcggagagaagtctgatagtcaaacttaagacagaatgtggataccagttcacttcgaaattagaaggcatgtttacagacatgaaaacctcccaggatacaatgcaagggttttatgcaagccacctggagctaggggatgcacggacactggttgttcaggttttgacaacagggtcttggcccactcaacctggtgttacatgcaacctgcctgcagaaatgtcagcactatgtgagaagttcaggtcatattaccttgggacccatactggtcggagattgtcatggcaaactaatatgggcacagcagacgttaaagcaacctttgggaagggtggtcagaagcacgagttgaatgtctccacttaccaaatgtgtgttctcatgctgtttaataatgctgagaggcttagctacaaagagattgagcaggcaactgagattcctgccgcagacttgaagaggtgcttgcaatccatggcttgtgtgaagggaaagaatgttcttcgcaaagaacccatgagtaaagacattggtgaggaagatgttttttttgttaatgacaaattcacaagcaaattctataaggtgaagataggaactgtagttgcacagaaggaatcagaacctgaaaagcaggagacgcggcagagagtagaggaggaccggaagcctcagatagaagctgcaatagttaggattatgaagtcgaggagggtattggatcacaacaatataatcactgaggtcacaaagcagttgcagtcacgtttcctagcgaaccccacagagattaagaaaaggattgaatcccttatagaacgagatttcttggagagggatagtgtggacagaaaactgtatcgatatcttgcttaa

SEQ ID NO: 13760 - protein, 733 aa, Populus trichocarpa
MSNQKKRNFQIEAFKHRVVVDPKYADKTWKILEHAIHEIYNHNASGLSFEELYRNAYNMVLHKFGEKLYNGLVATMTSHLREISKSVEAAQGDSFLEELNRKWNDHNKALQMIRDILMYMDRTYIPSTHKTPVHELGLNLWRDNIIHSSKIQTRLQNTLLELVHRERTGEVIDRGLMRNIVKMLMDLGSSVYQEDFEKPFLEVSAEFYRGESQKFIECCDCGDYLKKAEKRLNEEIERVTHYLDSKSEVKITNVVEKEMIANHMLRLVHMENSGLVNMLLDDKYEDLGRMYNLFRRVPNGLSTIREVMTSHLRETGKQLVTDPERLKDPVEFVQRLLDEKDKYDSIISNAFNNDKTFQNALNSSFEYFINLNARSPEFISLFVDDKLRKGLKGVSEEDVEIILDKVMMLFRYLQEKDVFEKYYKQHLAKRLLSGKTVSDDAERSLIVKLKTECGYQFTSKLEGMFTDMKTSQDTMQGFYASHLELGDARTLVVQVLTTGSWPTQPGVTCNLPAEMSALCEKFRSYYLGTHTGRRLSWQTNMGTADVKATFGKGGQKHELNVSTYQMCVLMLFNNAERLSYKEIEQATEIPAADLKRCLQSMACVKGKNVLRKEPMSKDIGEEDVFFVNDKFTSKFYKVKIGTVVAQKESEPEKQETRQRVEEDRKPQIEAAIVRIMKSRRVLDHNNIITEVTKQLQSRFLANPTEIKKRIESLIERDFLERDSVDRKLYRYLA

SEQ ID NO: 13761 - DNA, 2235 bp, Populus trichocarpa
  CDS (1)..(2235)
atggcgataaatgagcggaagactattgatcttgaacaaggatgggagtttatgcaaaagggaattactaagctgaagaacatcctagaagggttgcaagagccgcagttcagctccgaggactacatgatgctatacacaaccatttacaacatgtgtacgcagaagccccctcatgattattcccagcagctatacgacaaataccgggagtcttttgaagaatacattacttcaacggtattgccatcgttgagggagaagcatgatgaatttatgttaagagagctagttaaaaggtgggcaaaccataaagtcatggttaggtggctttctcgtttcttccattaccttgaccgctatttcattgcccggaggtcacttccaccacttaatgaagttggacttacttgcttccgtgatctggtgtaccaggaactgaatgggaaagtgagggatgctgtaatttctctgattgatcaagagcgtgaaggagagcagattgacagagctttattgaagaatgttttagatatatttgttgaaattggaatgggacagatggattactatgaaaatgactttgaagcagcgatgcttaaagatacagctgcttattattctcggaaggcatcaaactggatccttgatgattcttgtccagattacatgctaaaggctgaggagtgtctaaaacgggagaaagatagggtttctcattacttgcattccagtagtgagccaaaattgcttgagaaagttcaacatgagttgttgtctgtatatgccacccaactgcttgaaaaagagcactctggatgccatgctttgcttagagatgacaaggtggaggatttatcaagaatgttcaggctcttttctaaaatacctcgaggcttagatcctgtttctggtatatttaagcagcatgtcactgctgaaggtacagctttggtcaaacaggctgaagatgcagcaagcaataagaaggcagataaaaaggatgtggttggtttgcaagaacaggtttttgtcaggaaggtgattgagctgcatgacaaatatctggcatatgtcaatgattgtttccagaaccacactctcttccacaaggccctcaaggaagcttttgaggtcttttgcaacaagggtgttgctggaagttcaagtgcagaattactagcaaccttttgcgataacattcttaagaaaggtgggagtgagaaactgagtgatgaggccattgaggaaacactggagaaggtggtcaagctgcttgcttatattagcgacaaggacctgtttgcagaattttataggaaaaaacttgctcggcggcttctttttgataagagtgcaaatgacgaccatgagagaagcattttgacaaagctgaaacagcaatgcggtgggcaattcacctcaaagatggaggggatggttacggatttgacattagcacgtgaaaaccaaaccagttttgaggagtatctaagcaataacccaaatgcaaatcctgggattgacttgacagttactgttttgacaactggcttctggcctagttacaagtcttttgatctgaaccttccagcagagatggtcaagtgtgttgaagtttttagggaattttatcaaataaaaacaaagcacaggaaacttacctggatatactctttgggtacttgtaatcttatcggaaaatttgaacaaaaaaccatggagttgattgtgacaacctaccaggcatctgcactgttactttttaactcctcagatagattaagttattccgagatcatgactcaattgaacttgaccgatgatgatgttgttagactgctccactcgctgtcatgcgcgaagtataagattctaaacaaagagccaaatacaaaaataatatctcctactgatcactttgaattcaactccaaatttactgacaaaatgaggaggatcaagattcctctgcctcctgtagatgaaaagaagaaagtaattgaagatgttgacaaggatagaaggtatgctattgatgcctcaattgtgcgcatcatgaagagtcgcaaagttttgggtcaccagcaattggttatggagtgtgttgagcagttgggccgcatgttcaagcctgatttcaaggcaattaaaaaacggattgaagatctgattactcgagactatcttgaaagggacaaagaaaacccgaacttgttcagatacttggcataa

SEQ ID NO: 13762 - protein, 744 aa, Populus trichocarpa
MAINERKTIDLEQGWEFMQKGITKLKNILEGLQEPQFSSEDYMMLYTTIYNMCTQKPPHDYSQQLYDKYRESFEEYITSTVLPSLREKHDEFMLRELVKRWANHKVMVRWLSRFFHYLDRYFIARRSLPPLNEVGLTCFRDLVYQELNGKVRDAVISLIDQEREGEQIDRALLKNVLDIFVEIGMGQMDYYENDFEAAMLKDTAAYYSRKASNWILDDSCPDYMLKAEECLKREKDRVSHYLHSSSEPKLLEKVQHELLSVYATQLLEKEHSGCHALLRDDKVEDLSRMFRLFSKIPRGLDPVSGIFKQHVTAEGTALVKQAEDAASNKKADKKDVVGLQEQVFVRKVIELHDKYLAYVNDCFQNHTLFHKALKEAFEVFCNKGVAGSSSAELLATFCDNILKKGGSEKLSDEAIEETLEKVVKLLAYISDKDLFAEFYRKKLARRLLFDKSANDDHERSILTKLKQQCGGQFTSKMEGMVTDLTLARENQTSFEEYLSNNPNANPGIDLTVTVLTTGFWPSYKSFDLNLPAEMVKCVEVFREFYQIKTKHRKLTWIYSLGTCNLIGKFEQKTMELIVTTYQASALLLFNSSDRLSYSEIMTQLNLTDDDVVRLLHSLSCAKYKILNKEPNTKIISPTDHFEFNSKFTDKMRRIKIPLPPVDEKKKVIEDVDKDRRYAIDASIVRIMKSRKVLGHQQLVMECVEQLGRMFKPDFKAIKKRIEDLITRDYLERDKENPNLFRYLA

SEQ ID NO: 13763 - DNA, 2685 bp, Aspergillus flavus NRRL3357
  CDS (1)..(2685)
atgcagcaaaactcgagaggcgccaccgagcagaggagcggtaagcgcaaatcgaccggcaagaggaagctttctgatcaagaggaagccttacaacaacctcagcaccaacaggcgacgatttcggagctcctttcgcggaaccacacaacccacgggaaagagcatcatcatcatcttcaccagctatcctccccgacgagcaagcgcccccggctatcgccatccccctcgggtctaactcctgcacaaggttcgcggggaccagcttcatccaacaccatgtacaatttctcaaacaaggaaacgaaaggcagtggatcgtttggtcaagttacgccgggcaccaaccctggaaatacagcagcaaggccccgctccttcaatgcaccagtgcgccaaagcaacttcactcctcacaccggtgccaagaaacttgtggtcaagaatcttcgggtgggttctcggttgaatcaagattcatacttcgagaagatatggggccagcttgacgccgcgctgaccgcgatcttcgatggcgggaaaccggagatctcgctagaagagttgtacaaaggggctgagaatgtatgtcgtcaagggcgagcttcagcgttggccagacagctacaggagcgatgccgaggacatgtatcaggtaaactgcgtgatactctggtagtaaaagcagcgggtgggaacaacatcgatacgctacgagctgttgtggattcgtggacaacatggcaatcaaagctggttacagtacgctggattttctattacctcgatcagtcgttcctcctccactccaaggaatacccagttatacgcgagatgggcttgatccagttccggcaacatatattcaatgacacagtcttacagccacaagtgctacagggcgcctgcgacctggtcgaagcggaccgtgatgaagggcgcagcatatcggccgactcatctttgcttcggaacgctattgaatttttccacggccttgatgtttatactactggctttgaacccctccttgtctctgagtcgaagaagttctttgcattatgggctcagcatgaagcctcaggatatcttgccactttcgcggaaaacagtcaccgcttgattgaacaagaagtagacaggtgtacattgttctctttaaatcggagcacaaaacagaagttgtctgaactattggatcaggagttagtggcagaacaagagaatgttctcctcaaccaaaatgatattcttggtctgctgcgggccggcaataagactgccttagaaaagctgtatacgcttcttcaacgaagggatttgggggcgaaattgaaaacggcattcagcagttacatcgttgaggaggggaccagtatcgtctttgacgatgataaagaggcggagatggttgtccggctgctggatttcaaacagcagcttgacgagacttggaacaactccttccatcgacatgaggagctagggcacgccttgcgcgaggcatttgagacgttcatgaacaagggacgaaagtcgggcgcatccggaggcaccgataaccccaaaaccggtgagatgattgccaaatatgtggatagattactgaaaggcggctggaaattgcctcctggacgaaaagccgaggatgtacctcttgccgatgaggatgccgaaattaatcgacagttagaccaagtgttagatctcttccgatttgtacatggcaaagctgtatttgaggcattttacaagaacgaccttgctcgccggctactgatgggccgaagtgccagtgatgatgcagagaagagcatgctggcgaggctcaagacagaatgcggttccagcttcacacacaatctggaatctatgtttaaagacatggacgtggcgcgggatgaaatggcggcgtataattctattcagcgtgaacgcaagcaccgattaccggttgatttgaatgttagtgtgctctccgcggccgcgtggccgtcatatcccgatgttcaggtgcgaataccgcccgaaatcgcgacggctgtcagcgatttcgaaaagttttactatagtaaatacaacgggcgcaaacttaattggaagcaccaacttgcgcactgccagctgcgcgcaaggtttcccaaaggcgataaggagctggtagtcagttcattccaggccatcgtgcttctgctgtttaacgacatatcagaaaaggggacccttagctatctgcagatccaggaggcgacgaagttatctgaccaggagctgaaacggacccttcaatcgctcgcatgcgccaaataccgagtgcttgctaagaagccgaagggtcgcgaagtcaacacaacggacgagttctcgtacaacgagggattctccgacgtgaagatgcggatcaagatcaatcagatccagctaaaggagactaaggaggagaataagacgacacatgagcgggtggcagccgatcgtcattatgagacccaggcagctattgtgcggatcatgaagagtcggaagaccatcacacatcccgagttggtagcggaggtgattaaggcgacgcgcagccgaggagtgctcgaacctgcggatatcaagaagaacattgagaagctgattgaaaaggactacatggagcgagaagagggaaaccggtatcagtatgtggcataa

SEQ ID NO: 13764 - protein, 894 aa, Aspergillus flavus NRRL3357
MQQNSRGATEQRSGKRKSTGKRKLSDQEEALQQPQHQQATISELLSRNHTTHGKEHHHHLHQLSSPTSKRPRLSPSPSGLTPAQGSRGPASSNTMYNFSNKETKGSGSFGQVTPGTNPGNTAARPRSFNAPVRQSNFTPHTGAKKLVVKNLRVGSRLNQDSYFEKIWGQLDAALTAIFDGGKPEISLEELYKGAENVCRQGRASALARQLQERCRGHVSGKLRDTLVVKAAGGNNIDTLRAVVDSWTTWQSKLVTVRWIFYYLDQSFLLHSKEYPVIREMGLIQFRQHIFNDTVLQPQVLQGACDLVEADRDEGRSISADSSLLRNAIEFFHGLDVYTTGFEPLLVSESKKFFALWAQHEASGYLATFAENSHRLIEQEVDRCTLFSLNRSTKQKLSELLDQELVAEQENVLLNQNDILGLLRAGNKTALEKLYTLLQRRDLGAKLKTAFSSYIVEEGTSIVFDDDKEAEMVVRLLDFKQQLDETWNNSFHRHEELGHALREAFETFMNKGRKSGASGGTDNPKTGEMIAKYVDRLLKGGWKLPPGRKAEDVPLADEDAEINRQLDQVLDLFRFVHGKAVFEAFYKNDLARRLLMGRSASDDAEKSMLARLKTECGSSFTHNLESMFKDMDVARDEMAAYNSIQRERKHRLPVDLNVSVLSAAAWPSYPDVQVRIPPEIATAVSDFEKFYYSKYNGRKLNWKHQLAHCQLRARFPKGDKELVVSSFQAIVLLLFNDISEKGTLSYLQIQEATKLSDQELKRTLQSLACAKYRVLAKKPKGREVNTTDEFSYNEGFSDVKMRIKINQIQLKETKEENKTTHERVAADRHYETQAAIVRIMKSRKTITHPELVAEVIKATRSRGVLEPADIKKNIEKLIEKDYMEREEGNRYQYVA

SEQ ID NO: 13765 - DNA, 2235 bp, Sorghum bicolor
  CDS (1)..(2235)
atggcggggcaggagcgtaggacaatcgatctggaggagggatgggccttcatgcagaagggcatcaccaagctgaagaacatcctcgagggcaagcccgagccgcagttcagctccgaggactacatgatgctctacacgacgatatacaacatgtgcacgcagaagccgccacacgactactcgcagcagctttacgacaagtatagggagtcgttcgaggagtacatcacatccatggtactaccttcgttaagggagaaacatgacgagtttatgctgagggagctagtgcaaaggtggtcaaaccataaagtcatggttcgctggctctcacgtttctttcattaccttgaccggtacttcatatcaaggaggtcacttaccccacttaaagaagttggccttacttgcttccgagaattgatctatcaagagattaaagggcaagttaaagatgcagtgattgctctgatagacaaagaacgtgagggtgaacagattgaccgggctctgttgaagaatgtcttggatatttttgttgaaatcggtttgggtcaaatggagtgttatgagaatgacttcgaagatttcttgctcaaggatactacagagtactactctgtcaaggctcaaagctggattcttgaggactcatgcccagattacatgattaaggctgaggagtgtttgaagcgggagaaggagcgagttggtcactatttgcatattagcagcgaacaaaagttgttggagaaagtgcaaaatgaattgcttgctcagtatgcaaccccgctgttggagaaggagcattctggatgttctgctttgcttcgtgatgataaggttgaggatctttctaggatgtataggctcttctccaaaatcacccgcggtctggagcctatttctaacatgttcaaaacgcatgttacaaatgagggcacagccttggtaaagcaagctgaagattctgctagtaataagaagccagagaagaaggatatggttggcatgcaggaacaggtgttcgtgtggaaaatcattgagctgcatgacaaatatgtagcttatgtgacagaatgtttccagggacatacactcttccataaggcacttaaagaagcctttgaggtcttctgtaacaaaggtgtctctggcagttcaagtgctgagttgttggctaccttctgcgacaatattctgaagaaaggttgcagtgaaaagctcagtgatgaagccattgaagatgcccttgagaaggtggtgagattgctggcatacatcagtgataaagacctatttgccgagttctataggaagaagcttgcaagaagattactttttgacaaaagtgctaatgacgagcatgagagaagtattctgacaaagctcaagcaacagtgtgggggacaatttacttcaaaaatggagggcatggttacagaccttactgtcgctagagatcaccagactaagtttgaagagtttgtagctggacatccagagttgaatcctgggatagacttggctgttactgttttgacaacgggattctggccaagctacaaaacttttgacataaaccttcctgctgagatggtgaaatgtgtagaggttttcaaggagttctatcaaacaagaacaaagcacaggaagctgacatggatttactcattgggtacctgcaacatcaatgctaagtttgacgctaaacccattgagctcattgttacaacatatcaggctgcattgctactgctgttcaatggatccgacaggcttagttattctgagattgtaacacaattaaatctgtcagatgatgatgtagtgcgcttgcttcattcgctttcttgtgcgaaatacaagatcctcaccaaggaaccggcaaatagatccatatcgcccaatgatgtttttgagttcaattcaaaatttactgacagaatgagaagaattaagattccactccctcctgttgatgagaagaaaaaggttgttgaagatgttgacaaagacaggaggtatgcaattgatgcatcaattgtgcgcattatgaagagccgcaaagttatgggtcatcaacagctggttgctgaatgtgttgagcagctgagccgcatgtttaagcctgacttcaaagccataaagaagaggattgaggatctcatcacaagggactacttggagcgcgacaaggacaatgcaaatatgtacaaataccttgcctga

SEQ ID NO: 13766 - protein, 744 aa, Sorghum bicolor
MAGQERRTIDLEEGWAFMQKGITKLKNILEGKPEPQFSSEDYMMLYTTIYNMCTQKPPHDYSQQLYDKYRESFEEYITSMVLPSLREKHDEFMLRELVQRWSNHKVMVRWLSRFFHYLDRYFISRRSLTPLKEVGLTCFRELIYQEIKGQVKDAVIALIDKEREGEQIDRALLKNVLDIFVEIGLGQMECYENDFEDFLLKDTTEYYSVKAQSWILEDSCPDYMIKAEECLKREKERVGHYLHISSEQKLLEKVQNELLAQYATPLLEKEHSGCSALLRDDKVEDLSRMYRLFSKITRGLEPISNMFKTHVTNEGTALVKQAEDSASNKKPEKKDMVGMQEQVFVWKIIELHDKYVAYVTECFQGHTLFHKALKEAFEVFCNKGVSGSSSAELLATFCDNILKKGCSEKLSDEAIEDALEKVVRLLAYISDKDLFAEFYRKKLARRLLFDKSANDEHERSILTKLKQQCGGQFTSKMEGMVTDLTVARDHQTKFEEFVAGHPELNPGIDLAVTVLTTGFWPSYKTFDINLPAEMVKCVEVFKEFYQTRTKHRKLTWIYSLGTCNINAKFDAKPIELIVTTYQAALLLLFNGSDRLSYSEIVTQLNLSDDDVVRLLHSLSCAKYKILTKEPANRSISPNDVFEFNSKFTDRMRRIKIPLPPVDEKKKVVEDVDKDRRYAIDASIVRIMKSRKVMGHQQLVAECVEQLSRMFKPDFKAIKKRIEDLITRDYLERDKDNANMYKYLA

SEQ ID NO: 13767 - DNA, 2217 bp, Sorghum bicolor
  CDS (1)..(2217)
atgaacggcggcggcggcggccagaagaagcggggcacgaggatcgagcccttccggcaccgcgtcgagaccgaccccaagttcttcgacaagtcgtggcggaagctccatgacgccatccgcgagatctacaaccacaacgccagcggcctctccttcgaggagctctacaggactgcttataacatggtcctgaacaagtttgctcctcagctctatgagaaactcacagaaaacatgaaagaacatcttgaagatatgcgcacatgtatagatgctgctcaaggtggtttgttcctggaagagttgcagcgaaaatggaatgaccacaacaaggcattgacaatgattagagacatcctgatgtatatggacaggacttatattcctactaacaaaaagacacctgtctttgatcatggattagagctttggagggataccatagtccggtctcccacaattcagaggaggttgtctgacacgcttcttgaactcatacatagtgaaaggacaggcgatgtgattaatagaggcttgatgaggactacaacaaaaatgttgatggatctagggttgtctgtttatcaggatgattttgaaaggccatttcttgaggtttctgctagtttctatagtggtgagtcacaacaattcattgagtgctgtgcttgtggtgagtatctgaagcaggctgagaggcgcctctctgaagaatcagagcgtgtgtcccaatacttggatgtcaaaacccatgagaaaattactgctgttgtggtgaatgagatgctcgcaaatcacatgcagaggttgattcttatggagaactcggggcttgtgaatatgcttgttgaagacaggtatgaagacctgaccaggatgtacactttgtttaatcatgttcctgatgggctcacaacaatcagatctgttatggcatctcatattaaggatactggcaaaagtttggtaacagatcctgagagattaaaggacccagttgattttgttcagcggcttcttaacatgaaggataagtatgacaatatcatcaatgtgtcatttagcaatgacaagagtttcctgaatgctcttaattcctcatttgagcacttcataaacttaaacaacagatcccctgagttcatatcactgtttgttgatgacaaattgcggaagggggtgaaagaggctaatgaggaagatcttgaaactgtcctggacaaggtgatgatgctgtttagatatttgcaagaaaaagatctatttgagaaatattacaagcaacacttggcaaagcgtcttctttctgggaagaatgcttctgatgattctgagagaagcatgcttgtgaagctgaagacagaatgtggctaccagtttacttcgaagttggagggcatgttcaatgatttgaagacttctgaggatactacacaagggttttatgcatctacttcctcggagcttctggcagatgcccccacaatatctgtccagatactcaccactgggtcatggccaacacaaacctgcaatacctgcaaccttccccctgaaattgtccctatctcagagaagtttcgggcttattaccttggcacacataatggcaggaggctaacatggcaaacaaacatggggcatgctgacataaaagcaacatttggaaatggcagcaagcatgaactgaacgtctcaacataccagatgtgtgttctgatgctgtttaactcatccgatgtcttgacttaccgtgaaattgagcagtctacagcaataccagctactgacctgaagcgatgcctccagtcgctagctcttgtgaaaggtaagcaagtcctgcgaaaagagcccatgagccgggacattgccgatgatgacagcttcttcgtgaacgacaagttcaccagcaagctcttcaaggtgaagattggcactgtggcggcgcagaaggagaccgaccctgagaagctagagacacggcagcgggtcgaggaggataggaagccgcagatcgaggcggccattgtgcggatcatgaagtcgaggagggttctagaccacaacagcataatgatggaggtgacgaagcagttgcagccccgtttcatgccaaaccccgtggtgatcaagaagcggattgagtcgctcatcgagcgcgagttcctggagcgggacaagacggacaggaagatgtaccgttatctcgcctaa

SEQ ID NO: 13768 - protein, 738 aa, Sorghum bicolor
MNGGGGGQKKRGTRIEPFRHRVETDPKFFDKSWRKLHDAIREIYNHNASGLSFEELYRTAYNMVLNKFAPQLYEKLTENMKEHLEDMRTCIDAAQGGLFLEELQRKWNDHNKALTMIRDILMYMDRTYIPTNKKTPVFDHGLELWRDTIVRSPTIQRRLSDTLLELIHSERTGDVINRGLMRTTTKMLMDLGLSVYQDDFERPFLEVSASFYSGESQQFIECCACGEYLKQAERRLSEESERVSQYLDVKTHEKITAVVVNEMLANHMQRLILMENSGLVNMLVEDRYEDLTRMYTLFNHVPDGLTTIRSVMASHIKDTGKSLVTDPERLKDPVDFVQRLLNMKDKYDNIINVSFSNDKSFLNALNSSFEHFINLNNRSPEFISLFVDDKLRKGVKEANEEDLETVLDKVMMLFRYLQEKDLFEKYYKQHLAKRLLSGKNASDDSERSMLVKLKTECGYQFTSKLEGMFNDLKTSEDTTQGFYASTSSELLADAPTISVQILTTGSWPTQTCNTCNLPPEIVPISEKFRAYYLGTHNGRRLTWQTNMGHADIKATFGNGSKHELNVSTYQMCVLMLFNSSDVLTYREIEQSTAIPATDLKRCLQSLALVKGKQVLRKEPMSRDIADDDSFFVNDKFTSKLFKVKIGTVAAQKETDPEKLETRQRVEEDRKPQIEAAIVRIMKSRRVLDHNSIMMEVTKQLQPRFMPNPVVIKKRIESLIEREFLERDKTDRKMYRYLA

SEQ ID NO: 13769 - DNA, 2211 bp, Sorghum bicolor
  CDS (1)..(2211)
atgagcggcggtggcccgccgaggaagcgcaacttcaagatcgaggcgttcaagaaccgtgtggagctcgaccccaagtacgcggagcggacatggaaggtcctcgagcacgccatccacgagatctacaaccacaacgccagtggcctctccttcgaggagctttacaggagtgcctacaacatggtgcttcacaagtatggtgagaagctgtatgatggccttcagaacacaatgacatggcgcttgaaggaaatatcaaaatccatagaggctgcacagggtggtttatttttggaggagctgaatgcaaagtggatggatcacaacaaggcgttacagatgatacgagatattcttatgtacatggacaggacatatgtccctacatctcataggacacctgttcatgagcttggtctgaatttgtggagggatcacataattcactccccaatgatccatagtcggctggttaacacccttttggatcttataaaaggggaaagaatgggtgaagtgattaacagaggcctgatgaggagcataacgaagatgctgatggatctgggtcctgctgtgtatcaagacgattttgagaaaccatttctcgatgtttcagccagcttctacagtgtggagtctcaagagttcattgagtgctgtgactgtgggaactaccttaagaaggccgagaggcgtctaaatgaggaaatggagcgtgtctcacactacttggatgctggcagtgaggcaaagataactagtgtagtggagaaagaaatgattgccaatcacatgcacagattggttcacatggaaaattcggggcttgttaacatgctagtagatgacaggtatgaagatttgggtcggatgtattccttgttccgaagggttcctgatgggttatcaacaattagagatgtcatgacttattacctgagggaaacagggaagcagttagtgacggatccagaaagtttgaaagatccagtcgaatttgtccaacgtttgttaaatgagaaggacaagcatgataagatcattagtgttgcttttggcaatgacaaaaccttccagaatgctctgaattcgtcttttgagtatttcatcaacttaaacaaccgatcacctgaattcatatcattatatgttgatgacaaactccgcaaaggacttaaaggggccacagaagaagatgtggaggttatactggacaaagtcatgatgctgttccgatacctccaggagaaggatgtgtttgaaaagtactataagcagcatttggctaaaaggctcctgtctggcaaaactgtttctgatgatgctgagagaagtatgatagttaaactgaagacagaatgtggataccagttcacttccaagctagaaggcatgttcactgatatgaaaacctcccaggacaccatgcaagacttctatgccaagaagtctgaggaactcggggatggccctacacttgatgtccacattttgacaactggttcttggccaacgcagcccagccctccttgcaaccttccaactgaaattcttacagtatgtgagaaattccgggcatattatcttgggactcacaatggccggagattgacatggcaaacaaacatgggtacagctgacataaaagccacatttggaaaaggccagaagcatgaactgaatgtatccacttatcagatgtgtgttctcatgctgtttaacaatgctgatggattgacctacaaagacattgaacgggatactgagatacctgcctcagacctaaagagatgtctgcagtcccttgcttgtgtcaaggggaagaatgttctccgtaaggagcccatgagcaaggacatttcggaggatgatacattctactttaatgataagttcacaagcaagcttgttaaagtgaagattgggacagtggtagcgcaaaaggaatctgaaccagagaaacaagagactcgacaacgggttgaggaggacaggaaacctcagatcgaggcagccattgtcaggatcatgaaatcacggagggtgttggatcataacagcattgtagctgaggttaccaagcaattacaagcacgtttcttgccaaatcctgttgtcataaagaagcgcatcgaatctctaattgagcgtgaattcttggaaagagacaaagtagatagaaaattatatcgttatcttgcatag

SEQ ID NO: 13770 - protein, 736 aa, Sorghum bicolor
MSGGGPPRKRNFKIEAFKNRVELDPKYAERTWKVLEHAIHEIYNHNASGLSFEELYRSAYNMVLHKYGEKLYDGLQNTMTWRLKEISKSIEAAQGGLFLEELNAKWMDHNKALQMIRDILMYMDRTYVPTSHRTPVHELGLNLWRDHIIHSPMIHSRLVNTLLDLIKGERMGEVINRGLMRSITKMLMDLGPAVYQDDFEKPFLDVSASFYSVESQEFIECCDCGNYLKKAERRLNEEMERVSHYLDAGSEAKITSVVEKEMIANHMHRLVHMENSGLVNMLVDDRYEDLGRMYSLFRRVPDGLSTIRDVMTYYLRETGKQLVTDPESLKDPVEFVQRLLNEKDKHDKIISVAFGNDKTFQNALNSSFEYFINLNNRSPEFISLYVDDKLRKGLKGATEEDVEVILDKVMMLFRYLQEKDVFEKYYKQHLAKRLLSGKTVSDDAERSMIVKLKTECGYQFTSKLEGMFTDMKTSQDTMQDFYAKKSEELGDGPTLDVHILTTGSWPTQPSPPCNLPTEILTVCEKFRAYYLGTHNGRRLTWQTNMGTADIKATFGKGQKHELNVSTYQMCVLMLFNNADGLTYKDIERDTEIPASDLKRCLQSLACVKGKNVLRKEPMSKDISEDDTFYFNDKFTSKLVKVKIGTVVAQKESEPEKQETRQRVEEDRKPQIEAAIVRIMKSRRVLDHNSIVAEVTKQLQARFLPNPVVIKKRIESLIEREFLERDKVDRKLYRYLA

SEQ ID NO: 13771 - DNA, 2235 bp, Sorghum bicolor
  CDS (1)..(2235)
atggcgacgcacgagcggaagacgatcgatctggagcaggggtgggagttcatgcagaagggcatcaccaagctcaagaacatcctcgagggcaagcccgagccgcagttcagctccgaggactacatgatgctctatacgacgatttacaacatgtgcacgcagaagccgccgcatgactactcccagcagctctacgagaagtaccgcgaatcattcgaggaatacatcacatccatggtcttaccttcacttagggagaagcatgatgagtttatgttgagagagcttgtaaaaaggtggtcaaaccataaagtaatggttcggtggctgtcacgcttcttccattatcttgatcgttacttcatttcccgaagatcactgccaccgcttagagaagtcgggcttagttgtttcagagacttggtatatcaagagatcaaaggaaaagtaaaaagtgctgtgatatctttgattgaccgagaacgtgagggtgaacaaatagatagggcactattgaagaatgtcctcgatatatttgttgaaattggtttgggtactatggagtgctatgaaaatgattttgaagatttcttgctcaaagatactgcagattactactctatcaaagcccaatcctggatccttgaggattcttgtccggattacatgctaaaggctgaagaatgcctgaaaagggaaaaggaacgagtttctcactatttgcattctagcagtgagcagaagttactggagaaagtgcagcatgaactgctaactcagtatgctagccaactcttggagaaggagcattctggatgtcatgcactacttcgtgacgacaaggttgaggatctgtctaggatgtataggctcttttccagaataacacgtggcctagaacctgtttctcagatatttaagcagcatgttactaatgagggcacagctttagtcaagcaagcagaagatgctgctagtaataaaaagccagagaagaaggacatggttggtttacaagaacagatttttgttcggaaaattattgagcttcatgacaagtatgtagcatatgttacagagtgtttccagggccacacgctctttcataaggcccttaaagaggcttttgaggttttctgcaacaaaggtgtttctggtagttcaagtgctgaattgctagccaccttttgtgacaatatattaaagaaaggtggcagtgaaaagcttagcgatgaagcaattgaagatacccttgagaaggtggtaaggctgcttgcgtacattagtgataaggacttgtttgctgaattttacaggaaaaagctcgcgaggagattgctttttgacaagagtgctaatgatgagcatgaaagaagcatcctgaccaaactaaaacaacagtgtggagggcaattcacttcaaaaatggagggcatggttactgatctcactgttgcaagagatcatcaaacaaaatttgaagagttcataagcagccatccggagctgaatcctggaatagacttagctgtcactgttctgacaacaggtttttggccgagctacaaatcttttgatataaatctgccttctgaaatggtgaaatgtgtagaggttttcaaagagttttaccaaacaagaacaaagcacaggaagcttaccttgatatattcccttggaacctgcaatatcagtgctaagtttgaagccaaaactattgagctcattgttacaacttatcaggctgcactgctgctactatttaatggggctgaccggcttagctattctgagattgtgacacagctaaatctctcagatgatgatgttgttcggcttctccattcactttcttgtgcaaagtacgatattcttaacaaagaaccaaataacagatctatagcaccaaatgacgtctttgagtataattcaaaatttaccaacaagatgcgaagaataaagatacctcttcctccagttgatgagaagaagaaagtagttgaagatgttgataaggatcgtagatatgcaattgatgcatccattgtccgcattatgaaaagccggaaagttttgggccatcaacagcttgtaatggaatgtgtggaacagcttggtcgcatgttcaagccggacttcaaggcaataaagaagcggattgaggaccttatcacaagggattatttggaaagggataaagataacccgaatgtgtacagatacttggcttga

SEQ ID NO: 13772 - protein, 744 aa, Sorghum bicolor
MATHERKTIDLEQGWEFMQKGITKLKNILEGKPEPQFSSEDYMMLYTTIYNMCTQKPPHDYSQQLYEKYRESFEEYITSMVLPSLREKHDEFMLRELVKRWSNHKVMVRWLSRFFHYLDRYFISRRSLPPLREVGLSCFRDLVYQEIKGKVKSAVISLIDREREGEQIDRALLKNVLDIFVEIGLGTMECYENDFEDFLLKDTADYYSIKAQSWILEDSCPDYMLKAEECLKREKERVSHYLHSSSEQKLLEKVQHELLTQYASQLLEKEHSGCHALLRDDKVEDLSRMYRLFSRITRGLEPVSQIFKQHVTNEGTALVKQAEDAASNKKPEKKDMVGLQEQIFVRKIIELHDKYVAYVTECFQGHTLFHKALKEAFEVFCNKGVSGSSSAELLATFCDNILKKGGSEKLSDEAIEDTLEKVVRLLAYISDKDLFAEFYRKKLARRLLFDKSANDEHERSILTKLKQQCGGQFTSKMEGMVTDLTVARDHQTKFEEFISSHPELNPGIDLAVTVLTTGFWPSYKSFDINLPSEMVKCVEVFKEFYQTRTKHRKLTLIYSLGTCNISAKFEAKTIELIVTTYQAALLLLFNGADRLSYSEIVTQLNLSDDDVVRLLHSLSCAKYDILNKEPNNRSIAPNDVFEYNSKFTNKMRRIKIPLPPVDEKKKVVEDVDKDRRYAIDASIVRIMKSRKVLGHQQLVMECVEQLGRMFKPDFKAIKKRIEDLITRDYLERDKDNPNVYRYLA

SEQ ID NO: 13773 - DNA, 2208 bp, Sorghum bicolor
  CDS (1)..(2208)
atggcacacagccgcgagccaatcctcctcgatgaggggtgggcacatatgagggccggcttcgaaaagctcaagctcatcctcgccggtgaacccggcgtcgccttcgtctccgtcgagtacatgcacctctacactacaatatacaatatgtgcacgcagaagcctccaaatgactactcggggctgctctaccaaaggtaccaggaggttttgaacgactacatcactgccacggacaagcacggcgagttcctgctgaaggaactggtgttcaggtggaaaaaccataagctaatggtcaggtggctcagcaggtttttctactatcttgaccgctactttatttcacggaggtcactcgtgccccttaaaaatgttggctgggattcattcaaaactctggtttttgacaaccataaagcaacagtgacatcgattctgattgccatggttgacgaggatagggagggacagattatagatcgtactcttgtcaagaatgttcttgatatctatattgaaattgattctgattctgggtcaaaactttacaacgaggacttcgaagatgcctttctgaaggctacagttgattactattctaagaaggcccaagcctggattgtggaggacacgtgccctgaatacatggttaaggcagaggagtgtttacaaaaagagaagcaacgagttgcacagtatttgcatgctaatactgaaccgaggttgatggaggatgtgcaagaagaattgctaacttcgcatatggagcaaattctgaggaaacagaactctggatgcaaagtgttgctttgtgatgaaaaggttgaagatctttcaaggatgtttagtctcttctctaggattaatggtggcctgactccagtatctaaaatattccaggagcatgtcaatgaagtaggcatgtctttgttgaaacaagcaatagatgctgctaccagcaaaaagaatgagaagaaagatgtagtgagtacattggaactggagttttttttgttggttctaattggcagcttattacaggactatgtgcggaaaatcttagatctccatgacaaatacaaggcatatgtcatcaactgtttccaaaaccatacactatttcacaaggcacttaaggaggcctttgaagttgtttgcaataaaactgttgctggttgctctagtgctgaattgttcgcagcatactgtgacagcattcttaaaaaaggtggatgtgaaaaacttagtgacgaagcaattgaagagaaccttgataaggcatggaaaaaactaggaaggagattgatctttgataggagtggcaatagtgatcaagagcgaagcctgctgtccaagctaaagcagtattttggagcgcagtttacttcaaaaatggagggcatgatcaatgatgtcacagttgcaaaagataagcacacagacttagaaaattacataagagagaacccagaattaaatcctagggtagacctgagtgttcaggttttgacaacaggatactggccaacttacaaaagcactgatataaatcttccttcagagatggttaaatgtgtggaggttttcagtaaattttatcattccaacacggatcgaaaaagaaagcttaattggatttattccttgggtaattgcaccgttgttgggaatttcaaagcccaaaaaattgatctgattgttacaacttatcaggctgcactcctgttgctattcaacgagtctgaaagactaagtttctctgagatcgtgacacaattaaacctttctgaagatgatactgtgcgtctgcttcattcactgtcatgtgcaaagtacaagattctcaacaaagagccaaatagcagaacaatttccccaaaggacgtctttgagttcaaccacagatttaccgataaaatgcgcaggataaaggtaccacttcctccatccgatgagaagaaaaaggtaatcgaagatgttaacaaggacaggaggtttgcaattgatgcagcgctagtgcgtattatgaagagccgcaagatcatgacccaccagaatctcgttgcggaatgtgtgcaacagctcagccgcatgttcaagcctgatatcaaaatgatcaagagaaggattgaggaccttatcaccagagactacctggaacgcgatagagacgcgccgaactcatatcgatacgtagcttga

SEQ ID NO: 13774 - protein, 735 aa, Sorghum bicolor
MAHSREPILLDEGWAHMRAGFEKLKLILAGEPGVAFVSVEYMHLYTTIYNMCTQKPPNDYSGLLYQRYQEVLNDYITATDKHGEFLLKELVFRWKNHKLMVRWLSRFFYYLDRYFISRRSLVPLKNVGWDSFKTLVFDNHKATVTSILIAMVDEDREGQIIDRTLVKNVLDIYIEIDSDSGSKLYNEDFEDAFLKATVDYYSKKAQAWIVEDTCPEYMVKAEECLQKEKQRVAQYLHANTEPRLMEDVQEELLTSHMEQILRKQNSGCKVLLCDEKVEDLSRMFSLFSRINGGLTPVSKIFQEHVNEVGMSLLKQAIDAATSKKNEKKDVVSTLELEFFLLVLIGSLLQDYVRKILDLHDKYKAYVINCFQNHTLFHKALKEAFEVVCNKTVAGCSSAELFAAYCDSILKKGGCEKLSDEAIEENLDKAWKKLGRRLIFDRSGNSDQERSLLSKLKQYFGAQFTSKMEGMINDVTVAKDKHTDLENYIRENPELNPRVDLSVQVLTTGYWPTYKSTDINLPSEMVKCVEVFSKFYHSNTDRKRKLNWIYSLGNCTVVGNFKAQKIDLIVTTYQAALLLLFNESERLSFSEIVTQLNLSEDDTVRLLHSLSCAKYKILNKEPNSRTISPKDVFEFNHRFTDKMRRIKVPLPPSDEKKKVIEDVNKDRRFAIDAALVRIMKSRKIMTHQNLVAECVQQLSRMFKPDIKMIKRRIEDLITRDYLERDRDAPNSYRYVA

SEQ ID NO: 13775 - DNA, 2505 bp, Sorghum bicolor
  CDS (1)..(2505)
atgtctcagccccacgccgccgctgccgcctcgaagcgccccttctcgtccaccaccacatccccgtccccgacctcctcccctgcgacgccgcttatgaagaaggccaagcaccccgccgcctcctcctcctccgcggggaccgtcgagaagaacggcatccaacttgataccgccgtcgccgccgccgccgccacgggcgggggccgaacgaacggcgaggaggatgcggagatggtgctcgcggaccaggacgagctccccgcgcccagcgcgccggcctccgcgggcgttgccgccaacctcttccgtaagaaggccacgctcccgcagccgtcgacctccgcccgcaagcccctccgcatcaaaataggtcaaccaaaactgccaaaaaacttcgaagaggatacatgggcaattttgaaggatgctatcacagctatttttctcaagcagaaactttcttgtgatgttgagaaactctatcaggctgctggtgatctttgtctacacaagctaggggcaaacctatacgaacgaatcaagaaagaatgtgaaatacacatagctgaaaaaatatcagcattagtgggtcaaagcccagatttggttgtatttttgtctctggtccaaagaacatggcaagatttttgtgatcagatgttgattattcgtggtattgctttacttcttgatgtaaaatatgtcaagaatgtggcaaatatttgttcagtgtgggatatggggctgcaactgttccgcaagcatctatcactatccccggagattgaacacaaaactgtaactggccttctcagattgattgagagtgagaggcttggtgaagcaatagataggacattacttagtcatcttctgaagatgctcactgctcttggaatgtattcagagagttttgaaaagccctttcttgaatgcacttctgaattttatgctacggaaggtgttaaatatatgcaacaatctgatattccagactacctgaagcatgtggagtcgaggttgcaagaagaacatgaaaggtgtattctatatttggaagctaacacaaggaagccactaatcgcaactactgaaaagcaattgctagaacgtcatacatctgcaattattgagaaggggttctctatgctcatggatgcaaatcgtataaatgacctctcgaggatgtacgaccttttccagagggttaacgctgttgagttgctaaaactagcgcttagttcatatatccgggctacaggccagggcattattatggatgaagaaaaggacagagaattagttccatttcttcttgattttaaggcatcccttgacaaaatattggaagaaagttttgccaagaatgaggctttctcgaataccataaaagattcatttgagcaccttatcaatctaagacagaaccgacctgcggaattgattgcaaagtttcttgatgagaaacttcgagctggcaataaagggacatcagaagaagagctggagggtatacttgatagagttttggtcctgtttcggtttatacaaggtaaagatgtatttgaggcattctacaagaaggatctagctaagaggttgctgcttgggaagagcgcatcaatagatgctgaaaaatcgatgatcacaaaactcaaaactgagtgtggaagtcagtttaccaacaagctggagggaatgttcaaggacattgaattatccaaagaaataaatgattcattcaggcaatcatctcaagctaggacaaagcttccctctggcattgaaatgagtgttcatgtgcttacaacaggctattggcctacatatccaccaatggacgtgaaactcccacacgaactgaatgtgtaccaggatatatttaaagagttctatttgagcaagtacagtggaaggcgtttaatgtggcagaattctttgggacattgtgtcttgaaagcggactttcccaaaggcaaaaaggaacttgcagtgtcattgtttcagagtgtggttttgatgttgttcaatgatgcacaaaagttaagtttccttgacatcaaagattccactggtatcgaggataaagaattgagacggacactgcaatcacttgcatgtggtaaagttcgggttctccaaaagataccaaaagggagagatgtagaagataaggatgaatttgtattcaatgaagattttagtgctcccctctatcgcataaaggtaaatgcaattcaaatgaaggagacggtagaagaaaacacgagcaccactgagagagtgttccaggatcggcagtatcaggttgatgcagccatagttcgaataatgaagacgcggaaggtcctcagccacacccttctaataacggagctttaccagcagctcaagttccctgttaagccagctgatatcaagaaaagaatagagagcttgatcgaccgggagtacctggaacgggacaggagtaacccccagatctacaactatctggcttga

SEQ ID NO: 13776 - protein, 834 aa, Sorghum bicolor
MSQPHAAAAASKRPFSSTTTSPSPTSSPATPLMKKAKHPAASSSSAGTVEKNGIQLDTAVAAAAATGGGRTNGEEDAEMVLADQDELPAPSAPASAGVAANLFRKKATLPQPSTSARKPLRIKIGQPKLPKNFEEDTWAILKDAITAIFLKQKLSCDVEKLYQAAGDLCLHKLGANLYERIKKECEIHIAEKISALVGQSPDLVVFLSLVQRTWQDFCDQMLIIRGIALLLDVKYVKNVANICSVWDMGLQLFRKHLSLSPEIEHKTVTGLLRLIESERLGEAIDRTLLSHLLKMLTALGMYSESFEKPFLECTSEFYATEGVKYMQQSDIPDYLKHVESRLQEEHERCILYLEANTRKPLIATTEKQLLERHTSAIIEKGFSMLMDANRINDLSRMYDLFQRVNAVELLKLALSSYIRATGQGIIMDEEKDRELVPFLLDFKASLDKILEESFAKNEAFSNTIKDSFEHLINLRQNRPAELIAKFLDEKLRAGNKGTSEEELEGILDRVLVLFRFIQGKDVFEAFYKKDLAKRLLLGKSASIDAEKSMITKLKTECGSQFTNKLEGMFKDIELSKEINDSFRQSSQARTKLPSGIEMSVHVLTTGYWPTYPPMDVKLPHELNVYQDIFKEFYLSKYSGRRLMWQNSLGHCVLKADFPKGKKELAVSLFQSVVLMLFNDAQKLSFLDIKDSTGIEDKELRRTLQSLACGKVRVLQKIPKGRDVEDKDEFVFNEDFSAPLYRIKVNAIQMKETVEENTSTTERVFQDRQYQVDAAIVRIMKTRKVLSHTLLITELYQQLKFPVKPADIKKRIESLIDREYLERDRSNPQIYNYLA

SEQ ID NO: 13777 - DNA, 2367 bp, Talaromyces stipitatus ATCC 10500
  CDS (1)..(2367)
atgagtctaaccagtgctgcctttgaagctcctgttatccctgtccgccgatcagatcgcctgaaagagtacaattcgcttaccggaatggcgacaccccagaaggacgatgtccaagacacatggacttatctagaaaatggcattaatagtgtgatgctgaaactggaggaaggtgttgacatgaagacatacatgggcctttacacggcagttcataacttttgcacatcacagaaagctgttggtagtagtggaggcttacaagctcttcgtggcgctcacctccttggcgaagaattatacaatctcctcggacaatatttatcgaaacatttagaggacgtgtatcaggactccgagacacacattgaagaagctttactagggttttatattcgggagtgggatcgctatacgacagctgccaagtatatcaaccatctgttccgctacttgaatcgacactgggtgaaacgcgagattgacgaaggaaagaaacacatttacgatgtatacactcttcatctcgtaaaatggcgcgaggatttcttcaagcgggtccaagaaagggtcatggctgcagtactcaatctcgttgagaaacaacgtaacggtgagacgattgaacagtcgcagattaagagcatagtggattcatttgtttctttgggtctggatgagaacgacagcaccaagtcgactctcgaggtctatcggttctactttgagcgacctttcatcgatgctacccgtgtctactatgagaacgaatcccgtcagttcgtctctgaaaatagcgttgtggagtatatgaagaaagcagaaactcgattggaggaggagaaggctcgtgtcggactttatttgcacccggacatcacgaagcggctgacggagacgtgcttggacgttttggtctctgctcattcagatcttctccgcgacgaatttcaggttcttctcgacaacgatcgacaagatgatttggcccgtatgtatagattgttatcaaagatcaaggacggtctcgaccctctccgtgccaagttcgagaggcacgtccgcaatgcgggtactgctgcagttgagaaggtcgcttctgaaggagagagcttcgagccgaagatgtatgtcgatgctttgttacaagtccattctcgataccaaaaccttgtcaacgctgcctttgcgggtgagtccgaatttgttaggtctctggataatgcttgccgggaatttgtcaaccgcaactccatttgcaagagtaattcttccaagtcgccggaattactggcacgttatacagattctttgctcaagaagggatccaaggccaccgaagagtcagagttggaggagatgctcacgcagattatgactgttttcaagtatattgaagacaaggacgtctttcaaaagttctactcgaaatctcttgccaagcggttggtgcacatcatttccgtttcggaagatgcggagactagtatgattagcaagctgaaggaggcatgcggtttcgagtataccaacaagctgcagcgtatgttccaggatatccaaatttccaaggatctgaatgctagttacaaggattggcaagagaaggttcatgatgaagaggaccgaaagaagatggttgatcctcattatcaggttttgggtacaggattctggcctctcaatgcccccacaacagagttcattccgccaacggaaatcgtcaagacggcagagcgatttcaacatttctactttgacaagcacagcggtcgtaaattaacatggctatggcagctttgcagaggtgaaataaaggctaattacatcaaaaacgccaaagtcccttacacattccaagtgtcgacgtatcaaatggggatcttacttctctacaacgaacatgactctctcgattacgacgagattcaaaaggccaccaaacttgccaatgagattctcgagccgaatattactctgttgttgaaggcaaaagtattattagccaactctgaagggtccaagccggctcctggagtgtcattctcactaaactataactttaagcacaagaaagttaaagtcaacctgaaccttacaatcaagtcagagcaaaagaccgaagccgacgatacacataagacgattgaagaggaccgtaaactacttcttcagtccgcaatcgtccgaatcatgaaatcacgcaagaaaatgaaacacgtccaactcgtccaagaagtcattcaacaagtcaaagcacgcttcccgcccaaaatccccgatatcaagaaaaacatcgaagcgcttatggagaaagattatattgaacgtctggacaatgatgaattggcctatattgcataa

SEQ ID NO: 13778 - protein, 788 aa, Talaromyces stipitatus ATCC 10500
MSLTSAAFEAPVIPVRRSDRLKEYNSLTGMATPQKDDVQDTWTYLENGINSVMLKLEEGVDMKTYMGLYTAVHNFCTSQKAVGSSGGLQALRGAHLLGEELYNLLGQYLSKHLEDVYQDSETHIEEALLGFYIREWDRYTTAAKYINHLFRYLNRHWVKREIDEGKKHIYDVYTLHLVKWREDFFKRVQERVMAAVLNLVEKQRNGETIEQSQIKSIVDSFVSLGLDENDSTKSTLEVYRFYFERPFIDATRVYYENESRQFVSENSVVEYMKKAETRLEEEKARVGLYLHPDITKRLTETCLDVLVSAHSDLLRDEFQVLLDNDRQDDLARMYRLLSKIKDGLDPLRAKFERHVRNAGTAAVEKVASEGESFEPKMYVDALLQVHSRYQNLVNAAFAGESEFVRSLDNACREFVNRNSICKSNSSKSPELLARYTDSLLKKGSKATEESELEEMLTQIMTVFKYIEDKDVFQKFYSKSLAKRLVHIISVSEDAETSMISKLKEACGFEYTNKLQRMFQDIQISKDLNASYKDWQEKVHDEEDRKKMVDPHYQVLGTGFWPLNAPTTEFIPPTEIVKTAERFQHFYFDKHSGRKLTWLWQLCRGEIKANYIKNAKVPYTFQVSTYQMGILLLYNEHDSLDYDEIQKATKLANEILEPNITLLLKAKVLLANSEGSKPAPGVSFSLNYNFKHKKVKVNLNLTIKSEQKTEADDTHKTIEEDRKLLLQSAIVRIMKSRKKMKHVQLVQEVIQQVKARFPPKIPDIKKNIEALMEKDYIERLDNDELAYIA

SEQ ID NO: 13779 - DNA, 2241 bp, Micromonas sp. RCC299
  CDS (1)..(2241)
atgatgggcgataggaagatcatcaacctcgaggatggatgggacttcatgcagaaaggaatcaccaagcttcgcgccatcctcgaggatggagggcaggaacctttcacaccggaggagtacatcaacctctacaccaccatctacaatatgtgcacgcagaaaccgccccacgacttctcccagcagctgtacgagaggtaccgcgaggctttcaacgcgtacatcacctccgacgtcctccccgcgctgcgcgagaagcagggcgagtacatgctgaaggagctcgtgaagcgctgggacaaccacaagatcatggtccggtggctctcgcgcttcttcaactacctcgacaggtactacatccagcgtcacaacctcgcgcagctgaaggacgtgggcatgctgtgcttccgcgacctcgtctattccgagctcaagaagaacgtcaaggacgcggtgctcgcgctggtggataaggaacgcgacggcgagcagatcgaccgcgcgttggtcaagaacatcctcggcatcttcgtggagatgggcatgggcgggatggaggcgtacgagcaggacttcgaggcgcacctgctcacgaacacggcggcgttttacagcaggaaggcttccgtgtggatcgacgaggactcgtgcccggattacctggtcaaggcggaggagtgcctgaggcgggagaaggagagggtggggcactaccttcacgcgtcgtcggagaccaagctgctgaaggaggttgaaaaagaggttctcgcggcgtacgagactcagctgttggagaaggagcacagcggctgcgcggtgctgctccgcgacgacaagacggaggacctggcgaggatgttcaggctgttcaagcggatccccgcgggattgcccccggtggcggacatattcaaaaagcacgtggagaaggagggcgtcaccttggtgaagcaggcggaggatgcggagggagcgaagaaggaggctcccaaggacaaggcggcggcggcgcagggcaccgagcaggtctttgtccggtccatcatccagctccacgacaagtatctccagtacgtcgtggactgcttcagcaacgactccttgttccatcgcgctctgaaggaagcgttcgaagttttctgcaacaaagtcgtcacggggagcacgtctgccgagttgctcgctcttttctgtgacaagctgctccagaagggcagcagcgagaagctttcggacgaggaggtggagatgacgttggagaaggtggtcaagctcttggcctacatcagcgataaggaccttttcggcgagttttaccgcaagaaactgtccaggcgtttgcttttcgacaggagcgccaacgacgaccacgagcggtccatcctgaccaagctcaagacgcagtgcggcgcgcagttcacgagcaagatggagggcatggtgaccgatctgcagatcgcgaaggacaaccaaaaggagttcgagaagtggctagacgacgacgagacccgcaagcccaagatggagttcgccgtcacggttctgaccaccgggttctggcccacgtacaaattcaccgagctggcgctgcccgaggagtgcgtcggatgcgtcaccacgtttaaggagttttacgataagaagctgcagcaccgcaagctgacgtggatttacggcctcggtcaggtcactatgaaagggaacttcgcgtccaagcccatcgagctcaacatcaacctgttccaggctgccatcttgctcctcttcaacgagcaggagaccctcaagtacacggagattcgcgagaggctcggactgccagatgaagacatggcgcgtaacctgcactcgctgtcgtgcgccaagtacaaggtcctgctcaaggaacccgagaacaagagcattaaccaggacgacgtgttcacgtacaacgaaaagttcaccgacaggatgcgccggatcaagattccgctcccgcagattgacgacaagaagaaggttgaggcggatgttgacaaggaccgacgctacgccatcgacgcggcgattgtgcggacgatgaagagccgtaaggtgcttccgcaccagcagctcgtgctcgaggttgtgcagcagctgacgaagatgttcaagcccgactttaagattatcaagaagcggatcgaggacctcatctcgcgagattacctggagcgcgacaaggacaaccccaacgtgttcaagtacatggcttga

SEQ ID NO: 13780 - protein, 746 aa, Micromonas sp. RCC299
MMGDRKIINLEDGWDFMQKGITKLRAILEDGGQEPFTPEEYINLYTTIYNMCTQKPPHDFSQQLYERYREAFNAYITSDVLPALREKQGEYMLKELVKRWDNHKIMVRWLSRFFNYLDRYYIQRHNLAQLKDVGMLCFRDLVYSELKKNVKDAVLALVDKERDGEQIDRALVKNILGIFVEMGMGGMEAYEQDFEAHLLTNTAAFYSRKASVWIDEDSCPDYLVKAEECLRREKERVGHYLHASSETKLLKEVEKEVLAAYETQLLEKEHSGCAVLLRDDKTEDLARMFRLFKRIPAGLPPVADIFKKHVEKEGVTLVKQAEDAEGAKKEAPKDKAAAAQGTEQVFVRSIIQLHDKYLQYVVDCFSNDSLFHRALKEAFEVFCNKVVTGSTSAELLALFCDKLLQKGSSEKLSDEEVEMTLEKVVKLLAYISDKDLFGEFYRKKLSRRLLFDRSANDDHERSILTKLKTQCGAQFTSKMEGMVTDLQIAKDNQKEFEKWLDDDETRKPKMEFAVTVLTTGFWPTYKFTELALPEECVGCVTTFKEFYDKKLQHRKLTWIYGLGQVTMKGNFASKPIELNINLFQAAILLLFNEQETLKYTEIRERLGLPDEDMARNLHSLSCAKYKVLLKEPENKSINQDDVFTYNEKFTDRMRRIKIPLPQIDDKKKVEADVDKDRRYAIDAAIVRTMKSRKVLPHQQLVLEVVQQLTKMFKPDFKIIKKRIEDLISRDYLERDKDNPNVFKYMA

SEQ ID NO: 13781 - DNA, 2235 bp, Ricinus communis
  CDS (1)..(2235)
atgacgatgaatgagcggaagacaattgacctagagcaaggatgggaatttatgcaaaaggggataactaagctgaagaacatcctagaaggattgcctgagccacagttcagctctgaggactacatgatgctctatacaaccatttacaacatgtgtactcagaaaccacctcatgactactcccaacaactgtatgacaagtaccgtgagtctttcgaagaatacattacttcaacggtattgccatctttaagagagaagcatgatgagtttatgttgagagagcttgtgaaaaggtgggcaaaccataaagttatggtaaggtggctttctcgtttcttccactacctcgaccgttactttattgctcggaggtcacttccacccctgaatgaagttggactcacttgcttccgtgatctggtctaccaggaattaaatgctaaagtgagggatgctgtaatatctctgattgaccaagagcgtgaaggagagcagattgaccgagctttactaaagaatgttttggatatttttgttgagattgggatggggcaaatggattactatgagaatgactttgaagtggccatgcttaaagatacaggttcttattattcccgtaaggcatcaaactggatattagaagattcttgtccagattatatgttaaaagctgaggagtgtttaaaacgagagaaagatagggtttcacattacttacactcaagtagtgagccaaagttgcttgagaaagttcaatacgagctgttgtctgtatttgcaaaccaactgcttgaaaaagagcactctgggtgccatgcgctgcttagggatgacaaggtggaagatttatcacgaatgttcaggctcttttctaaaattcctcgaggcttagatcctgtttccagcatatttaagcagcacgttactgccgaaggtacagctttggtcaaactagctgaagatgcagcaagcaataagaaggcagagaaaagggatgttgttggtttacaagaacaggtttttgtaaggaaggttattgagctgcatgacaaatacttggcatatgtgaatgattgtttccagaatcacacccttttccacaaggcgctgaaagaagcttttgaagtcttctgcaataagggagttgctggaagttctagtgcagaactattagccaccttttgtgataatattcttaagaaaggcgggagtgagaaactaagtgatgaagccattgaggaaacacttgagaaggtggtaaagctgcttgcttatattagtgacaaggacttgttcgcggaattttatagaaaaaagcttgcacggcgtcttctattcgataagagtgctaatgatgaccatgagagaagcattttgaccaagctgaagcagcaatgtggtggccagttcacctcaaagatggaggggatggtaacggatttgacattagcacgggaaaaccaaaccagttttgaagagtatctaagcaataatccgaatgcaaatccggggattgacttgacagttactgttttaactaccgggttctggccaagttacaagtcctttgatttgaatcttccagcagagatggttaagtgcgttgaagtttttagggaattctatcaaacaaaaacaaagcacagaaaacttacatggatttactcattgggcacttgtaaccttattgggaaatttgaacccaaaaccatggagctgattgtgacaacctatcaggcttctgcattgttgcttttcaattcttctgatagattgagttattcggagatcatgactcaattaaatttgaccgatgatgacgttgttagattgcttcattctttgtcatgtgcaaagtataagattctaaacaaagagccaaatacaaaatctatatctcctactgattactttgaatttaactccaagttcactgacaagatgaggaggatcaagattcctcttcctcctgtggatgagaagaagaaagtaattgaagatgttgacaaggataggcggtatgctattgatgcctcaattgtgcgcatcatgaagagccggaaagttttaggccaccagcaactggttctggaatgtgttgagcagttgggtcgcatgttcaagcctgacttcaaggcaattaagaaacggattgaagacctgattacaagagactatctggagagggacaaagataatcctaatttgttcagatacttggcttaa

SEQ ID NO: 13782 - protein, 744 aa, Ricinus communis
MTMNERKTIDLEQGWEFMQKGITKLKNILEGLPEPQFSSEDYMMLYTTIYNMCTQKPPHDYSQQLYDKYRESFEEYITSTVLPSLREKHDEFMLRELVKRWANHKVMVRWLSRFFHYLDRYFIARRSLPPLNEVGLTCFRDLVYQELNAKVRDAVISLIDQEREGEQIDRALLKNVLDIFVEIGMGQMDYYENDFEVAMLKDTGSYYSRKASNWILEDSCPDYMLKAEECLKREKDRVSHYLHSSSEPKLLEKVQYELLSVFANQLLEKEHSGCHALLRDDKVEDLSRMFRLFSKIPRGLDPVSSIFKQHVTAEGTALVKLAEDAASNKKAEKRDVVGLQEQVFVRKVIELHDKYLAYVNDCFQNHTLFHKALKEAFEVFCNKGVAGSSSAELLATFCDNILKKGGSEKLSDEAIEETLEKVVKLLAYISDKDLFAEFYRKKLARRLLFDKSANDDHERSILTKLKQQCGGQFTSKMEGMVTDLTLARENQTSFEEYLSNNPNANPGIDLTVTVLTTGFWPSYKSFDLNLPAEMVKCVEVFREFYQTKTKHRKLTWIYSLGTCNLIGKFEPKTMELIVTTYQASALLLFNSSDRLSYSEIMTQLNLTDDDVVRLLHSLSCAKYKILNKEPNTKSISPTDYFEFNSKFTDKMRRIKIPLPPVDEKKKVIEDVDKDRRYAIDASIVRIMKSRKVLGHQQLVLECVEQLGRMFKPDFKAIKKRIEDLITRDYLERDKDNPNLFRYLA

SEQ ID NO: 13783 - DNA, 2025 bp, Ricinus communis
  CDS (1)..(2025)
atggtgctgcataaatttggtgaaaagttgtattctggtctagtttcaacgatgacatcacatcttaaagaaatctcaaaatctattgaggctgctcaaggggattcatttttggaggagctgaacaggaaatggaatgaccataataaagcattgcaaatgattagggacatattgatgtacatggataggacatacattccaagcactcataaaacccctgttcatgagcttggactgaacctttggagggataacatcatacactccagcaaaattcaaacaaggcttttgaacacacttcttgaattagttcacagagaacgaacaggtgaagttatagaccgaggattgatgaggaacattatcaagatgcttatggatttaggttctttggtttaccaagaggattttgagaagccatttcttgaggtttcagcagagttttacaaggttgaatctcagaagttcattgaatgctgtgattgtggggagtatttgaagaaagctgagaaacgtttgaatgaagagatagagagagtgacacactacttggatgcgaagagtgaagtcaagataactaatgtggtggagaaggaaatgattgctaaccacatgctgagactagtccacatggagaattctggtctggtgaatatgcttcttgatgataaatatgaagacttgggaagaatgtataacctattccgtcgggtatctaatggtcttcagaccattcgagaagtgatgacttctcacctcagggagactggtaagcaactagttactgatccagaaaggctgaaggatcccgtggaatttgtgcagcgtttgttggatgaaagagacaagtacgatagcatcataagcttggcattcaacaatgataaaacattccagaatgcgttgaattcttcttttgaatattttattaatttgaatgctcgctctcctgaattcatttcattgtttgtggatgacaaacttcgtaaaggtctaaagggagttagtgaggaggatgtggagattattcttgacaaggtgatgatgctgttccgctacttacaagagaaagatgtttttgagaagtattataaacagcatttggctaagcggctattatcaggaaaaactgtctctgatgatgcagagagaagtttgatagtcaagctcaagactgaatgtggatatcaattcacttcaaaactagaaggcatgtttactgacatgaagacctcccaggatacaattcaagggttttatgcaagccacccagagctaggggatggacctacacttgtagtccaagttctgacgacaggatcttggccaacccagcctagtgttacttgcaacctacctgctgagatgtcagcactgtgtgaaaagttcaggtcatattaccttgggacccatacagggcggagactgtcctggcaaactaacatgggcacagcagatataaaagcaacattcggaaggggtcagaaacatgagttgaatgtatctacatatcaaatgtgtgtccttatgctatttaacaatgctgatcggcttagctacaaggagattgagcaggcaacagagattcctgcttcagacttgaagaggtgcctgcaatccatggcttgtgtgaaaggaaagaatgttcttcggaaagaacccatgagtaaagacattggtgaagaagatgctttttttgtcaatgataagttcacaagcaaattctacaaggtgaagataggaactgtagttgcacaaaaggaatcagaacctgaaaagcaggagactcggcagagggtggaggaggacaggaagcctcagattgaagcagcaatagttaggatcatgaagtcaaggagggtattagatcataacaatataattactgaggtcacaaagcagttgcagtcacggtttctggcaaatcccacagagattaagaaacgaatcgagtctcttattgaacgagacttcttggagagggatagtgttgatagaaaactgtatcgatatcttgcttaa

SEQ ID NO: 13784 - protein, 674 aa, Ricinus communis
MVLHKFGEKLYSGLVSTMTSHLKEISKSIEAAQGDSFLEELNRKWNDHNKALQMIRDILMYMDRTYIPSTHKTPVHELGLNLWRDNIIHSSKIQTRLLNTLLELVHRERTGEVIDRGLMRNIIKMLMDLGSLVYQEDFEKPFLEVSAEFYKVESQKFIECCDCGEYLKKAEKRLNEEIERVTHYLDAKSEVKITNVVEKEMIANHMLRLVHMENSGLVNMLLDDKYEDLGRMYNLFRRVSNGLQTIREVMTSHLRETGKQLVTDPERLKDPVEFVQRLLDERDKYDSIISLAFNNDKTFQNALNSSFEYFINLNARSPEFISLFVDDKLRKGLKGVSEEDVEIILDKVMMLFRYLQEKDVFEKYYKQHLAKRLLSGKTVSDDAERSLIVKLKTECGYQFTSKLEGMFTDMKTSQDTIQGFYASHPELGDGPTLVVQVLTTGSWPTQPSVTCNLPAEMSALCEKFRSYYLGTHTGRRLSWQTNMGTADIKATFGRGQKHELNVSTYQMCVLMLFNNADRLSYKEIEQATEIPASDLKRCLQSMACVKGKNVLRKEPMSKDIGEEDAFFVNDKFTSKFYKVKIGTVVAQKESEPEKQETRQRVEEDRKPQIEAAIVRIMKSRRVLDHNNIITEVTKQLQSRFLANPTEIKKRIESLIERDFLERDSVDRKLYRYLA

SEQ ID NO: 13785 - DNA, 2358 bp, Penicillium chrysogenum Wisconsin 54-1255
  CDS (1)..(2358)
atgtctctcgcgatgccgccggttcctcacaaggacgaccttgattcaacttggtcgttcctagaagcaggaatcgagagcgtcatgctcaaccttgattccggtatcgatatgaagacttacatgggtctctacacggctgttcacaacttttgcacatcccaaaaggccgtcactagcggccaaggcctacaaggacaacgcgggggttggttcccttcccttcatgccgcaccctcggcttctcgattcgagctgacctggaaccaagcccatttgctcggcgaggaactttacaaattgctcggcgaatacctctcctgccatctgagtaaggttttcaaacaatcacagagccacaccgaggaaggcctgcttggcttctacatccgcgaatggtaccgctacacgaccgccgccaagtacgtgaaccaccttttccgctacctcaatcgtcactgggttaagcgtgagatcgacgagggtaagaaaaatgtctacgatgtttacaccctgcacttggtcaaatggaaaggggactttttcgaaaaagtccatgagaaggtcatggacgctgttctgaacctgatcgagaagcaacggaatggcgaaaccatcgaacagtcacaaatcaaatctattgtggactccttcgtgtcactgggtctggatgaaaacgatagctccaagtcaacactggatgtctatcggcagtacttccagctgccgttcattcgtgccaccaaaacctattacgaaaatgagtcacggcagttcgtggccgaaaatagcgtggtggagtatatgaagaaggcggaagctcgtctggaggaggagaagctccgggtcggtttgtatttgcacccagacgtcaccaagaccttgaccgatacctgtctatctgttcttgtcaccgcccactcgactttgcttcgcgacgagttccaagtattgctggataacgaacgccaggaggatcttgctcgtatgtatcgcctcttgtcacggatcaaggacggcttggaccctctgcgcacgacctttgaaaaccacgtgagacgggccggtctggctgctgtcgaaaaggttgcttcggagggcgagacactcgaacccaagttgtacgtcgacgctctattgcaagttcacactcgctaccaaagcttggtcgatgaggccttcaatggcgaggccgagttcgtgcgttctcttgataacgcctgccgagagtttgtcaaccgaaaccgcatctgcaagacgagctcttctaagtctcctgaacttctggcaaagtacaccgactcactactcaagaaaggatccaagtcagctgaagagtcggagcttgaagagatgctggtgcaaattatgacagtcttcaagtacatcgaagacaaagacgtcttccagaagttctattccaagaacctggccaaacgtctggttcatgtgagctctgtttcagatgatgctgaaacaagtatgatcagcaagctgaaggaggcgtgtggtttcgaatacaccaacaagctgcaacgcatgttccaggacatgcaaatctccaaggatcttaataacaactataaggtctggcaggacaaagtgctggatgatgatgaccgaaagagaatgaccgacgcccacttccagatactgggaactggcttctggcccctcaacgctccgaccacaccattccttgccccaccggagatcgtcaggaccgccgagctgttccagaaattttactttgataagcacaacggccgcaagttgacatggctgtggcaactttgcaagggcgaaatcaaggctaactatgtcaaaaacaccaaagtgccctacaccttccaggtgtcgacctaccagatgggcattcttctccttttcaacgaagctgacaccttgacctacggggagatcgaaaaggccactaccctggctaccgaaatcctcgatcccaaccttagcatcctgctcaaggcaaaggtcctcatcgccagccccgagggcgctaagcccgagccctctacctctttcacattgaactacaacttcaaaagtaagaaggtcaaagtcaacctcaatattcagatcaagtctgagcaaaaggtcgaggccgacgacacgcataaaacgatagaagaggacaggaagcttctgctccagtccgccattgttcgaatcatgaagtcacgcaagaagatgaagcacgtccagcttgtccaggaggttattcagcaggtcaagtcccgcttcccgcctaaaatccccgatatcaagaagaacattgaagccctcatggagaaggactatattgagcgcatggacggcgatgaaatctcgtacattgcctaa

SEQ ID NO: 13786 - protein, 785 aa, Penicillium chrysogenum Wisconsin 54-1255
MSLAMPPVPHKDDLDSTWSFLEAGIESVMLNLDSGIDMKTYMGLYTAVHNFCTSQKAVTSGQGLQGQRGGWFPSLHAAPSASRFELTWNQAHLLGEELYKLLGEYLSCHLSKVFKQSQSHTEEGLLGFYIREWYRYTTAAKYVNHLFRYLNRHWVKREIDEGKKNVYDVYTLHLVKWKGDFFEKVHEKVMDAVLNLIEKQRNGETIEQSQIKSIVDSFVSLGLDENDSSKSTLDVYRQYFQLPFIRATKTYYENESRQFVAENSVVEYMKKAEARLEEEKLRVGLYLHPDVTKTLTDTCLSVLVTAHSTLLRDEFQVLLDNERQEDLARMYRLLSRIKDGLDPLRTTFENHVRRAGLAAVEKVASEGETLEPKLYVDALLQVHTRYQSLVDEAFNGEAEFVRSLDNACREFVNRNRICKTSSSKSPELLAKYTDSLLKKGSKSAEESELEEMLVQIMTVFKYIEDKDVFQKFYSKNLAKRLVHVSSVSDDAETSMISKLKEACGFEYTNKLQRMFQDMQISKDLNNNYKVWQDKVLDDDDRKRMTDAHFQILGTGFWPLNAPTTPFLAPPEIVRTAELFQKFYFDKHNGRKLTWLWQLCKGEIKANYVKNTKVPYTFQVSTYQMGILLLFNEADTLTYGEIEKATTLATEILDPNLSILLKAKVLIASPEGAKPEPSTSFTLNYNFKSKKVKVNLNIQIKSEQKVEADDTHKTIEEDRKLLLQSAIVRIMKSRKKMKHVQLVQEVIQQVKSRFPPKIPDIKKNIEALMEKDYIERMDGDEISYIA

SEQ ID NO: 13787 - DNA, 2667 bp, Uncinocarpus reesii 1704
  CDS (1)..(2667)
atgcagaatcacgggacacgtgggaaccgcagaccaacgggcaagaggaaactctgtgagggcaacgcagaaacagctgaagaactggtacgaaataatcaaggcacaattccggatctcttttcacgaggaaggaataacatatcgggccataagaaccggccactctcgccgtcgagcaaacgggtgaagcgcagcgaagtggaatctcaccaacagcgagacccttcggtccaactgcagccaacccaagaacgacttccggtcgagaggatgtacagcttttcaagtcaggatgcgcaaaactcgtcgatcaggcagcaaaacaaccgtatctcttcgcctgccgtgatccaaaattacccaagcccgtcgacaactccaaccaatttcacgccacatacgggacccaaacgactcacagttaagaaccttcgagtggtgccgaagcttgatcaggaccagtattttgagacagtatgggcacaactcgaccgtgctctaaccgcgatattcaatggtcaaaagccagccgattcgttggaggaactgtacaaaggcgcagaaaatgtttgccgccaaaagcgggctttaaatttggcacagaagctgaaagaccgttgcaaaacttatatctccaattacgtggtaccaaccttggtcgcgaaatccaagaataatgacaacattgatactctgcgcttggtggaggctgcatgggcaacttggagtttacgtttggttacaatccgatcagtattttactatcttgatcagtcttttctcctccgctctacagaacaccctaccatctatgaaatggggatgattgcgtttcgatcaattgttttcctcaatgcatcactaaaaccgaaagttctgcagggaacgtgcgaattaattgacctggatcgaaataatgacccctctgccgattctactttgcttagacgcgcaatcaaactatgcctagacctcagaatttacaagcatgaattcgaaccagtgatgctagaaagctcaaaggaatatttaaagctgtgggcggataccgaagccaattctagctatctcgctacgtacgttgataaaagccatcgtgtcattgaaacggagatggcgagatgcgatctgttcaaccttgatatgagcaccaagcacagcatttcggaaatgcttgatacttacttgatagcaaatcaaactaatacgctattgaaggaaagcgacgtactaggactattcaggaccaataaccaggttgcccttgaacagctatattcactacttcaacgcctcgatctgggatcccgtctcaagtctgcgtttggctcatatatagctgacgagggttcctcaattgtattcgacaaagacagagagaatgaaatggttgtcaggctacttgatttcaaacaggatttggatgatattcttataaactcctttcaaaagaatgacgtactcgggcgtaccctccgggaagcatttgagacattcatcaacaaaagacagagaagggctaatggtgcgcagcctggggagatgattgcaaagcatgtggatcttctacttagaggaggtttgaaagcgattcgcaaacgtgaggttccaatgaagaacggcgaagacattgcgatgatcgatgaagatgtcgaattgaacaaggcactcgatcaagttctggacttgtttcgttttgtccacggaaaggcggttttcgaagccttctataaaaatgaccttgctcggcgtctgttaatgggaagaagcgctagcgatgatgctgaaaaaagcatgctggccagattagcatcagaatgtggctcgaacttcactcacaatctcgagtctatgttcaaagacatcgaccttgcgcgtgatgagatggcttcatacaatgctttgcagcgcgagaaacgagaaatgccagctatggatttgtacgttaacgtcctctcatcggcagcttggccatcctatcccgatgtaccggtgaaagtacctcgagtgatatcgaatgcgctgtccgacttcgagttgttctacaataacaaatataatgggaggaaactcaattggaagcactctcttgcgcattgccagctgaaagcaagattccccgccggcaacaaagagattgttgtaagctcattccaggcaattgtcttacttctgttcaacgatctatctgagggtcaaactttatcataccgtgaaatccaggaagagacaggcctttcggacattgaattgaagagaacccttcaatccctcgcctgtgcgaaatatcgagttctcaccaaaagcccaaaagggagagacgtaaatgcgacggatgccttcggattcaacaccaaattctctgatcccaaaatgcgcatcaaaatcaaccaaatccagctgaaagaaacgaaagaggaaaataaagagacacatgaacgcgttgcggcagatcggaattacgaaacacaggcagccattgtccgcatcatgaagagccgaaaagttatatcaccccaggagcttatcgtcgaagtgataaaagcaaccaagaaccgtggcgatctcgatccggcggatattaagaagaacattgacaagttgattgaaaaggaatatatggaacgggacaccgagtctaataagtacaagtatctgacgtaa

SEQ ID NO: 13788 - protein, 888 aa, Uncinocarpus reesii 1704
MQNHGTRGNRRPTGKRKLCEGNAETAEELVRNNQGTIPDLFSRGRNNISGHKNRPLSPSSKRVKRSEVESHQQRDPSVQLQPTQERLPVERMYSFSSQDAQNSSIRQQNNRISSPAVIQNYPSPSTTPTNFTPHTGPKRLTVKNLRVVPKLDQDQYFETVWAQLDRALTAIFNGQKPADSLEELYKGAENVCRQKRALNLAQKLKDRCKTYISNYVVPTLVAKSKNNDNIDTLRLVEAAWATWSLRLVTIRSVFYYLDQSFLLRSTEHPTIYEMGMIAFRSIVFLNASLKPKVLQGTCELIDLDRNNDPSADSTLLRRAIKLCLDLRIYKHEFEPVMLESSKEYLKLWADTEANSSYLATYVDKSHRVIETEMARCDLFNLDMSTKHSISEMLDTYLIANQTNTLLKESDVLGLFRTNNQVALEQLYSLLQRLDLGSRLKSAFGSYIADEGSSIVFDKDRENEMVVRLLDFKQDLDDILINSFQKNDVLGRTLREAFETFINKRQRRANGAQPGEMIAKHVDLLLRGGLKAIRKREVPMKNGEDIAMIDEDVELNKALDQVLDLFRFVHGKAVFEAFYKNDLARRLLMGRSASDDAEKSMLARLASECGSNFTHNLESMFKDIDLARDEMASYNALQREKREMPAMDLYVNVLSSAAWPSYPDVPVKVPRVISNALSDFELFYNNKYNGRKLNWKHSLAHCQLKARFPAGNKEIVVSSFQAIVLLLFNDLSEGQTLSYREIQEETGLSDIELKRTLQSLACAKYRVLTKSPKGRDVNATDAFGFNTKFSDPKMRIKINQIQLKETKEENKETHERVAADRNYETQAAIVRIMKSRKVISPQELIVEVIKATKNRGDLDPADIKKNIDKLIEKEYMERDTESNKYKYLT

SEQ ID NO: 13789 - DNA, 2316 bp, Branchiostoma floridae
  CDS (1)..(2316)
atgtcagcagggtcgtcacgtggccagaacccgcacgggttaaaacaaattggcttggatcagatctgggacgacctgaaggctgggattgagcaggtgtatcgtcgacaaaccatggccaagccaagatatatggagctgtacacccatgtgtataactactgtaccagtgtccaccagtcccagggacgtgtctcatctgccaagagcaagaagggggggcagcccacgggaggggcccagtttgtgggtctggagctgtacagacgactcaaggagttcctcaagaactacctgataaatcttctgaaggatggtgtggatctgatggacgaagatgtgctgcatttctacactaaacagtgggaggattaccagttctccagcaaagttctcaacggggtgtgtgcctacctgaaccgacactgggtccggagagagtgtgatgaaggcagaaaagggatctacgagatttattcactggcactggtgatctggagagaacacctgttcaaaccattgaacaagcaggtgaccaatgctgtactgaagctgatcgagcgagagaggaacggggagaccatcaacaccagactcatcagtggagttatacagtgctacgttgagcttggtttgaatgaagatgacctgctggctaagggtcccacacttaccgtgtacaaggattccttcgaaaatcacttcctctcggacacagaacggttctacaccaatgaaagttctgactttctgcgtcagaacccggtaacagagtacatgaagaaggcagagcaacgtttacaagaagaacaaagaagggtgcaagtatacctacatgagagcacacatgatgagttggccaagaagtgtgaacatgtgctcatagagaagcacctggaaatcttccacgcagagttccaaaatctcttggatgccgacaaaaatgaagatctgggcaggatgtacagtctggtatccaggattcaggatggactaggggagttgagaaacctgctggaacagcacatccacaaccaaggcctggcagcaatagagaagtgtggggagactgctgtcaatgatcccaaagtgtatgtacaaaccatcctggaagtgcacaaaaagtacaatgccttagtactgacagcattcaacaacgattctggatttgtggcatcattagataaggcatgtggcagattcatcaacaacaatgcagtgacacggatggtccagtcatccagcaagtctccagaactcctggccaggtactgcgattcactgctgaaaaaaagctcaaaaaacccagaggaagctgagctagaggacacgctgaaccaagttatgatagtattcaagtacatagaagataaggatgtgttccaaaagttctatgccaaaatgctggccaaacggcttgtccagcacaactcagccagtgatgatgccgaggccagcatgatctccaaactcaagcaagcctgtgggtttgagtacacatccaagctgcagaggatgttccaagacatcggggttagtaaggacctcaatgagcagttcaagaaacaccttgagaaaagtggggaacctttggatgtggacttcagtatccaggtattgagttcggggtcctggccatttcagcagggggcatccttcaccctgcccagtgagttggagcgaagtttccagcgtttcaccacattctacagcagtcagcacagtggtaggaaactcatgtggttgtatcacatgtcaaaaggagagctggtcaccaattgctttaaaaacaggtacacccttcaggcctctacgttccagatgagtgtgttgttacagtttaaccaggcagacagctacactgtacaacagctccacgagcacacacagctgaaaatggatatcttacagcaagtccttgccattctgttgaaggcaaaactgctagtaagcgaggaccaagaggaggagctaaagtcagagtctgtggtgtctctctttctgggctacaaaaataagaagctgcgtgtgaacatcaacgttcccatgaagacagaacagaagcaggagcaggagacaactcataagcacatcgaggaggaccgcaagcttctcatccaggctgccattgttcggatcatgaagatgcgtaaagtgttaaagcaccagcagctgctgggggaggtgttgactcagctgtcctccagattcaaacctagggtacctgttatcaagaaatgcatcgacatcttgatagagaaggaatatctggagagggtagacggggagaaagacacctacagctacctggcataa

SEQ ID NO: 13790 - protein, 771 aa, Branchiostoma floridae
MSAGSSRGQNPHGLKQIGLDQIWDDLKAGIEQVYRRQTMAKPRYMELYTHVYNYCTSVHQSQGRVSSAKSKKGGQPTGGAQFVGLELYRRLKEFLKNYLINLLKDGVDLMDEDVLHFYTKQWEDYQFSSKVLNGVCAYLNRHWVRRECDEGRKGIYEIYSLALVIWREHLFKPLNKQVTNAVLKLIERERNGETINTRLISGVIQCYVELGLNEDDLLAKGPTLTVYKDSFENHFLSDTERFYTNESSDFLRQNPVTEYMKKAEQRLQEEQRRVQVYLHESTHDELAKKCEHVLIEKHLEIFHAEFQNLLDADKNEDLGRMYSLVSRIQDGLGELRNLLEQHIHNQGLAAIEKCGETAVNDPKVYVQTILEVHKKYNALVLTAFNNDSGFVASLDKACGRFINNNAVTRMVQSSSKSPELLARYCDSLLKKSSKNPEEAELEDTLNQVMIVFKYIEDKDVFQKFYAKMLAKRLVQHNSASDDAEASMISKLKQACGFEYTSKLQRMFQDIGVSKDLNEQFKKHLEKSGEPLDVDFSIQVLSSGSWPFQQGASFTLPSELERSFQRFTTFYSSQHSGRKLMWLYHMSKGELVTNCFKNRYTLQASTFQMSVLLQFNQADSYTVQQLHEHTQLKMDILQQVLAILLKAKLLVSEDQEEELKSESVVSLFLGYKNKKLRVNINVPMKTEQKQEQETTHKHIEEDRKLLIQAAIVRIMKMRKVLKHQQLLGEVLTQLSSRFKPRVPVIKKCIDILIEKEYLERVDGEKDTYSYLA

SEQ ID NO: 13791 - DNA, 2316 bp, Clavispora lusitaniae ATCC 42720
  CDS (1)..(2316): transl_table=12
atgtcgaccccactccccatcgccggcgacttggacgccacatggaaattcatcgagcccgggctcgagttcatcttgggggcgcaaggcgaccagggcgtgacctcgaagatgtacatgaactgctacacggcggtgtacaactactgcaccaacaagtctcgccacaccagcgtggtgaacacgcggcccggcgccgacaagaccacgtactcgctcactggcgcggagatgtacacgcggttggagcggtacttggcccgcttcatccagcacttgcgggcggagccgggcgagctgtttttggagttctacgtgcgcacgtggaagcgctacaccattggcgctggctacttgaacaacgtgtttgactacatgaaccggtactgggtgcagaaggagcgcctggacgggcggcgcgacgtgtttgacgtgaacacgttggcgttgctccagtggaaagaacacatgttttccagcaacgtcgaccagatcatggcgcagattctcgacttgatcgagcgccagcgcaacaacgagatcgtcgacaccagcgtgatcctggtggccgtcaagctgatggtctacttgggcatcgacaccaacgacttgaagaaacccaacatggtggtgtacgccaagtgcttcgagagcgagttcatggagaagactgccgagtactaccgccgcgagagcgacaacttcctcgccctccacagcgtggtggactacatggtgcgctgcgagagccgtttggccgaagagattctgcgctccagcaactacttggaggaacgctcgcgccgccaccttctcgatacgctccacaacgtgttgatccgcgaccatgcccaggacatgtacgaccagttcttgcgcttgttggagcagaaggagatcgaaagcattctgcgcatgtacaagttgttgagcaaagtgccctcgactttgcaggcgttggccgacagcttggaggcccacatcaagagcgaagcggccaaggcgctcgaggagttgaaagcttcggctgaagcttcggagcccgacgacaaaccgcgccgtggccaaggtgccataacccccaaagcttacgtgcatgcgctcattctgctccacagcaagttcaacgacgttgtgtgcggcgccttcaagaaagacccgcttttcatcaaggcgttggatgcggcgtgccgctattttgtcaacgtcaacgtcattgccactcctacacctcgcgcttccagcaagaccccggagcttttggctcggtacgccgacggattcttgaaagcaacctcaaaggagacagacgtggccaacatgaccgcagacaacttggtgcttgtgttgaagtacgttgaaaacaaagatgtgtttgaaaacaactatcgccgcttgttggcgaagcgtttgatcaacgccaacacgaaaagcgacgagttggaagaaggcattttgcagaggttgcaggagggcaactccttggagttcacctccaaaatcaccaaaatgttccaggacatgaaatcgtcgcaggatttgaagggccgtgtccgtgaaatcgtgggtaactctgtggtcagcgacttcactccgcttgtgttggcccaaagtatgtggccatttacacacctagacgactataatctcaagctcgcgccagaacttgtgcgggccatcgaggtggtggaggatgagtatacgaaaaaacacaatgggcgagagttgcaatggttatggaaccacggaaagagcgaggtcaaggccaacttggcccgccgcggcaaaccgcctttcattttcaccgtcaccaatgtccagcttatgattcttcttgcgttcaacaaggccaccacgctcacgttttccgagctccacgaaaccgttggggtcgcacagcatgttttcgaagcgcatttatcccctttcaccaagttcaaattgcttgagcagaatccaccagacgctgcaagcttcaacgcgccaaatacaacctttacaattgtgtctgagtacaagtctaagaagttgaaggtgaactttgtcagcacgatcaagaacgaacaaaaacaggaggaagtcgacaccacacgcgagattgacgagtctcgtaagaactatcttacagccagcattgtgcggatcatgaaagcacgcaagaccatgaaacacaacgacttggtcaatgaggtgttgctccaggcacatctgcgtttcaaggcgaaacttatagacctcaagcgggccattgagtacttgcttgacaaggagtacatcgcacggtgtgacggcgactcctacgagtatctagcatga

SEQ ID NO: 13792 - protein, 771 aa, Clavispora lusitaniae ATCC 42720
MSTPLPIAGDLDATWKFIEPGLEFILGAQGDQGVTSKMYMNCYTAVYNYCTNKSRHTSVVNTRPGADKTTYSLTGAEMYTRLERYLARFIQHLRAEPGESFLEFYVRTWKRYTIGAGYLNNVFDYMNRYWVQKERSDGRRDVFDVNTLALLQWKEHMFSSNVDQIMAQILDLIERQRNNEIVDTSVISVAVKSMVYLGIDTNDLKKPNMVVYAKCFESEFMEKTAEYYRRESDNFLALHSVVDYMVRCESRLAEEISRSSNYLEERSRRHLLDTLHNVLIRDHAQDMYDQFLRLLEQKEIESISRMYKLLSKVPSTLQALADSLEAHIKSEAAKALEELKASAEASEPDDKPRRGQGAITPKAYVHALISLHSKFNDVVCGAFKKDPLFIKALDAACRYFVNVNVIATPTPRASSKTPELLARYADGFLKATSKETDVANMTADNLVLVLKYVENKDVFENNYRRLLAKRLINANTKSDELEEGILQRLQEGNSLEFTSKITKMFQDMKSSQDLKGRVREIVGNSVVSDFTPLVLAQSMWPFTHLDDYNLKLAPELVRAIEVVEDEYTKKHNGRELQWLWNHGKSEVKANLARRGKPPFIFTVTNVQLMILLAFNKATTLTFSELHETVGVAQHVFEAHLSPFTKFKLLEQNPPDAASFNAPNTTFTIVSEYKSKKLKVNFVSTIKNEQKQEEVDTTREIDESRKNYLTASIVRIMKARKTMKHNDLVNEVLLQAHSRFKAKLIDLKRAIEYLLDKEYIARCDGDSYEYLA

SEQ ID NO: 13793 - DNA, 2271 bp, Anopheles gambiae str. PEST
  CDS (1)..(2271)
atgcaccataccgaaaacgataaaaaacgggccaatttttcggccctgagccctatcaacggagcaattattaaaacaactgcaactggaaagcccggagatgttaaaaaaataataattaaaaatatgaaatcttacccatcaattccggaaaattttgaagaaactacatggaatcagctacgcaaagcagtaattgctattcagacgtctacacctattgaatactcgctagaatgtctctgccaggccgtatcgcatatgtgtgaagacaagatggattcgcaattatacgtcaacctgacggccctagtggagcagcatgtgaaggcaaacattgtaccttttttgtctgaatcgggcgacaaattggtgtatctaaagaaaatgaacgattattggcaatcgcactgccaacagatgatcatgattcgtagcattttcctatatcttgatcgcatatacgttttgaataatccaacagtgcattcgatttgggaaatggggctagaacttttccgtgatcatattgctatgaacaacttagtacaagcacgtaccgtcgaaggaattcttatattgatcgaaaaagagcggcatggtgacacggtagatcggtctctactaaagagccttttaagaatgctatctgatttgcaaatctatagagacgcgttcgagcaaaagttcctcatggccacgaaacatttgtatcaagcggaaggccaagccaagatggaagagcttgatgttccggattatttgcagcacgtggacaagcgtttgaacgaagaagaagaacgcttagaacactatctcgatggctgtacaaggcatcaactgatcgtaaccgttgagagacagcttatcaatgaacatgtaactggaattttgcaaaaaggtttagaccaactattagaggaaaacaggctgagtgatcttacccgactttacaagttgttcagtcgtgtcaaaaatggtacgacggaactctgtgcacattttaatgcttacataaaaaagaagggacgaaccatcgtcatagatccagagaaggacaaatcgatggtgcaggatctactggactataaagacaaaatggataacattgttaatacatgcttcgaaaggaatgaaaaattcggaaactcgctacgcgaagcttttgagtacttcataaaccaacgatctaataaaccggcagaattgattgcgaaatatgtcgatatgaaattgcgcgcaggaaacaaggaggcaaccgaagaagagttagaacagattcttgataagataatggtgcaatttaggttcattcacggcaaggacgtgtttgaagcattttacaaaaaagatttggccaaacgcctgctagttggcaagtctgcttcagttgatgcggaaaaaagcatgttatccaaactcaaacaagaatgcggcggaggattcacatcaaagctagaaggaatgttcaaggatatggaactgagtcgtgacataaattttgcttttaaacagagcatgcagaactcggaacacaaggaacttcagaacatcgatctaactgttaacatcttgacaatgggattttggccaacgtatcctgtcatggaggttacacttcctcaggaattattacagtatcaatcgattttcaacaaattctacctagcaaaacacagtggccgaaaactgcaatggcagccaacgcttggacattgcgtacttaaagcccaatttgatgcgggaccaaaagatttgcaagtgtctctgtttcaggcactagtgttgctgttgttcaactataatgctgctattacattcgaagaaattcgtgcagcagttaatatagagaatggagaattgaaacgcaccttacaatcgctcgcttgtggaaaggcacgtgttttgacgaaaatacccaaaggtcgtgaagtggaaaacactgacaaatttcagttcaacaatgaattcaccaataagttgtttaggattaaaataaatcaaatccaaatgaaggaaacgacggaagaacaaaaagccacagaagaacgtgtatatcaagaccgacaatatcaaattgacgcagcaattgtccgcattatgaagatgagaaaaacacttagtcacaacttgttaatcacggaattatataaacagctcacttttccagttaagccggccgatttaaagaaacgaatcgaatcattgatagatcgagattatatggaacgtgataaggataaccaaaaccagtataattacgttgcctaa

SEQ ID NO: 13794 - protein, 756 aa, Anopheles gambiae str. PEST
MHHTENDKKRANFSALSPINGAIIKTTATGKPGDVKKIIIKNMKSYPSIPENFEETTWNQLRKAVIAIQTSTPIEYSLECLCQAVSHMCEDKMDSQLYVNLTALVEQHVKANIVPFLSESGDKLVYLKKMNDYWQSHCQQMIMIRSIFLYLDRIYVLNNPTVHSIWEMGLELFRDHIAMNNLVQARTVEGILILIEKERHGDTVDRSLLKSLLRMLSDLQIYRDAFEQKFLMATKHLYQAEGQAKMEELDVPDYLQHVDKRLNEEEERLEHYLDGCTRHQLIVTVERQLINEHVTGILQKGLDQLLEENRLSDLTRLYKLFSRVKNGTTELCAHFNAYIKKKGRTIVIDPEKDKSMVQDLLDYKDKMDNIVNTCFERNEKFGNSLREAFEYFINQRSNKPAELIAKYVDMKLRAGNKEATEEELEQILDKIMVQFRFIHGKDVFEAFYKKDLAKRLLVGKSASVDAEKSMLSKLKQECGGGFTSKLEGMFKDMELSRDINFAFKQSMQNSEHKELQNIDLTVNILTMGFWPTYPVMEVTLPQELLQYQSIFNKFYLAKHSGRKLQWQPTLGHCVLKAQFDAGPKDLQVSLFQALVLLLFNYNAAITFEEIRAAVNIENGELKRTLQSLACGKARVLTKIPKGREVENTDKFQFNNEFTNKLFRIKINQIQMKETTEEQKATEERVYQDRQYQIDAAIVRIMKMRKTLSHNLLITELYKQLTFPVKPADLKKRIESLIDRDYMERDKDNQNQYNYVA

SEQ ID NO: 13795 - DNA, 2340 bp, Anopheles gambiae str. PEST
  CDS (1)..(2340)
atgagtcgagtgtccactcagaagaaggaaggcaaaatgaggatccgtgcctttccgatgactatggatgagaagtacgtggagtcgatatggtcgctgctcaagaacgctatccaggagatacagaaaaagaacaactcgggcctttcgtttgaggagctgtacagaaatgcgtacacgatggtgctgcacaagcacggcgagcggctgtacagcgggctgaaggaggtggtgacgcaccatctcgagtcgaaggtgcgcgaggaggtgctgcgcagcttcaactgcaactttctgcagacgctgaaccagtgctggaacgaccaccagacctcgatggtgatgatccgcgacatcctgatgtacatggatcgcgtgtatgtgcagcagaacgacgtggacaacgtgtacaaccttgggctgaacatcttccgtgatcaggtggtacgctatccgcgcattcgggatcacatgcgcgagacgctgctgaacatggtgatgtgcgagcggaagggcgaagcgatcgaccatatcgcgatcaagaacgcgtgccagatgctgatggtgctcggcatcaaccagcgctgggtgtacgaggaagacttcgagcggccgttcctgacgcagtcggccgcgttctacaagctcgagtcgcaaaagttcctcgccgagaacagtgcgagcgtgtacatccggcgggtggaggcccgcatcacggaggaggccgagcgggccaagctgtacctggacgagagcaccgagagccgcatcgtggaggtggtcgaggacgagctgatcaagaagcacatgcgcacgatcgtcgagatggagaactcgggcgtcgtgtacatgctgcagaacaccaagacggaggatctggcctgcatgcacaagctgttttcgcgcgtgagcggcggcctcaagacgatcgccgactgtgtgtcgcagaacctgcgctcgctcggccgcgacctggtgaaggaggaggagaacggcagcacgaacccgatcacgttcgtgcagaacctgctggatttgaaggaccggtcggaccacttcctgtaccactcgttcaacaacgacaagacgttcaagaacatgatatcgtccgactttgagcacttcctgaatctgaacagcaaatcgcccgaatatctgtcgctgttcatcgacgacaagctgaagaagggctgcaagggaatgtccgagcaagagattgaaaccatacttgacaaaacgatggtattatttagatatttgcaagagaaggacgtgttcgagcggtactacaaggcgcatctggcgaagcggctgctgctgaacaaatccgtcagcgacgattccgagaagaatatgatatcaaaattaaagactgaatgcggttgtcaatttacctcaaaattggaaggaatgtttaaggatatgtccgtctcgaacacggtgatggaggagtttaaaaatcacatcaacaacgataactcggcactggagggcgttgagctgacggttcgaattctcaccaccggattttggccaactcagtccgtgacgcctaactgcaacatcccggcagcaccgcggaaagcctttgaaacgttcaagcgtttctacctggcaaaacattcggggcgtcagctgacactgcagccacagctaggaacggtctacatgaatgccgaattctacggcgtaaaggcggagaaggagaaaacggaaggcaactgtagcagtacggccccgtctgcgggaagcagtagtgcgcctactggtggtgcggcctccctggacgcccccaaacgacatgtgcttcaattatcgacttatcagatgtgtgtactgatgctgtttaacaatcgcgaacgaatgacgtacgaagacatccagcaggagacggacatccctagcaaagatctgatccgcgcgctgcagtcactgtcgatgggcaaacagcagcagcgactcctggttcgaacaccgaaaacgtccaaagaaatcgtttccacggacgagttctacgttaacgatgcgtttgtgtcgaaatttcacaaagttaaaattcaaactgtcgcagccaagggcgaatcggaaccggaacggaaggaaacccgaagcaaagtcgacgaagatcgtaaacatgagattgaagctgctatcgtgcgtatcatgaaagcgcgaaagagaatgcctcacaacctgctcgtatcggatgtgacgtcgcagctaaagagccgtttcctaccgtcgccggtgattataaagaaaagaatagagggcctgatcgagcgggaatatcttgcccgcacgcccgaggatagaaaaatctatgtatatctagcttaa

SEQ ID NO: 13796 - protein, 779 aa, Anopheles gambiae str. PEST
MSRVSTQKKEGKMRIRAFPMTMDEKYVESIWSLLKNAIQEIQKKNNSGLSFEELYRNAYTMVLHKHGERLYSGLKEVVTHHLESKVREEVLRSFNCNFLQTLNQCWNDHQTSMVMIRDILMYMDRVYVQQNDVDNVYNLGLNIFRDQVVRYPRIRDHMRETLLNMVMCERKGEAIDHIAIKNACQMLMVLGINQRWVYEEDFERPFLTQSAAFYKLESQKFLAENSASVYIRRVEARITEEAERAKLYLDESTESRIVEVVEDELIKKHMRTIVEMENSGVVYMLQNTKTEDLACMHKLFSRVSGGLKTIADCVSQNLRSLGRDLVKEEENGSTNPITFVQNLLDLKDRSDHFLYHSFNNDKTFKNMISSDFEHFLNLNSKSPEYLSLFIDDKLKKGCKGMSEQEIETILDKTMVLFRYLQEKDVFERYYKAHLAKRLLLNKSVSDDSEKNMISKLKTECGCQFTSKLEGMFKDMSVSNTVMEEFKNHINNDNSALEGVELTVRILTTGFWPTQSVTPNCNIPAAPRKAFETFKRFYLAKHSGRQLTLQPQLGTVYMNAEFYGVKAEKEKTEGNCSSTAPSAGSSSAPTGGAASLDAPKRHVLQLSTYQMCVLMLFNNRERMTYEDIQQETDIPSKDLIRALQSLSMGKQQQRLLVRTPKTSKEIVSTDEFYVNDAFVSKFHKVKIQTVAAKGESEPERKETRSKVDEDRKHEIEAAIVRIMKARKRMPHNLLVSDVTSQLKSRFLPSPVIIKKRIEGLIEREYLARTPEDRKIYVYLA

SEQ ID NO: 13797 - DNA, 2301 bp, Magnaporthe grisea 70-15
  CDS (1)..(2301)
atggcgccagcctcacgggcaccgctgggcgtcgggtccggtcgggatgatatcgaagtcacgtggaactatctacagaatggaatcaccaggatcatgaacaacttacaagatggcatgactatggagacgtacatgggtatctatacctccgtacacaatttctgcacctcacagaaagctcttggcttttcaaattcgcccggccctccagcagctgcgcacagaggagcgcatcttcttggtgaggatctctacaagaagcttatgaaatacctgagcgatcatctcgaggacctgctcgtccagtctaaagcccataccggcgaggctttgcttagcttctacataagagagtgggatagatacacgaccgcagccaagtacatccaccacctcttccgatacctcaaccgccactgggtcaagcgcgagattgacgagggaaagaagcacatttttgatgtttacacactgcacctggtccagtggaagaatgtcttgttcgacaaggttcacgagaaggtgatggatgccgtccttgctttggtcgagaggcaacgaaacggagagaccatagagtatggtcagatcaagcaaattttagactccatggtctcgttgggcctggatgagaacgacgcgtccaaaaccacgctggactgctaccgtttccacttcgagaagccttttatcgccgctacggaagcatactaccaaaaggagagccgcgcgttcgtcgcggagaacactgtggttgagtacatgaagaaggcggaggcgcgtttagaagaggaggaggagcgagtccgaatgtacttgcatcccgacattgccgtggcactcaagcgctgctgcaacaccgctttgatcgcagaccactcggcgattctcagggacgaatttcaagtactgctggataatgaccgcgaggatgatatggcgaggatgtacaaccttttagctcgaatcagtgacggcctcgacccactgcgtcagaagttcgaagcccacgtgcgacaagctggcctgacggccgtggccaaggtcgcatctggccagggcgagaagctggagcccaaagtgtatgtggatgcgctgctcgaagtccacacgcaataccagggattggtcaagcgggcattcaacgacgagccagagtttacacgatctcttgacaacgcctgccgagaatttgtcaaccggaacgacgtttgcaagtccggatccaacaaatcccctgagctgcttgccaaatacacggatgttctccttcgcaagagcggcagtgccgtcgaggaggaggagctggagaacactttgagccagataatgactgtcttcaagtacatcgaagacaaggatgtcttccaaaagttctactcccggatgctggcccggcgtctcgtgcataccaactcatcctcggatgacgcagaaactagcatgatcagcaaactgaaggaggcatgtggcttcgagtacaccaacaaactgcaacgcatgttccaggacatgcagatttcgaaagacctcaacacgggtttccgtgagcatgctgaaaagtccgagatgaaggttttggactcgcaatacgcgatcctcggaactggcttttggccactacaagtccccaatactgccttcaaccccccggcggtcatatccgaggattgcgaacggttcacgcgcttctacaagaacaagcacgatggcagaaagctcacttggctttggcagctgtgcaaaggtgaggttcgagcgacctactgcaagcagagcaaagtgccatacaccttccaggtgtccatgtaccagatggcgattcttttgatgttcaacgacggcgatcgtcacacgcatgaggagatagcatctactacctctatgaacagcgagaccatggaccccgtactaggcctcttgctgaaagccaaggtccttctggcagacagtgacaagccaggcccagggaccacatacagcctgaattacgacttcaagaacaagaaagttcgtgtcaacctgaacattggtttgaagacagagcagaagcaggaagaggtggagacaaacaagacaattgaggaagaccgaaagcttcttctccagtcggccattgtgcgtattatgaaggctcgtaagcgtatgaagcacaaccagctggttagcgagaccatcggtcagatcaagggacggtttgtgcccaagattccggacatcaagaagtgcattgagattcttttggacaaagaatacctagagcgtctggaggatgatgatctcggctacctggcctga

SEQ ID NO: 13798 - protein, 766 aa, Magnaporthe grisea 70-15
MAPASRAPLGVGSGRDDIEVTWNYLQNGITRIMNNLQDGMTMETYMGIYTSVHNFCTSQKALGFSNSPGPPAAAHRGAHLLGEDLYKKLMKYLSDHLEDLLVQSKAHTGEALLSFYIREWDRYTTAAKYIHHLFRYLNRHWVKREIDEGKKHIFDVYTLHLVQWKNVLFDKVHEKVMDAVLALVERQRNGETIEYGQIKQILDSMVSLGLDENDASKTTLDCYRFHFEKPFIAATEAYYQKESRAFVAENTVVEYMKKAEARLEEEEERVRMYLHPDIAVALKRCCNTALIADHSAILRDEFQVLLDNDREDDMARMYNLLARISDGLDPLRQKFEAHVRQAGLTAVAKVASGQGEKLEPKVYVDALLEVHTQYQGLVKRAFNDEPEFTRSLDNACREFVNRNDVCKSGSNKSPELLAKYTDVLLRKSGSAVEEEELENTLSQIMTVFKYIEDKDVFQKFYSRMLARRLVHTNSSSDDAETSMISKLKEACGFEYTNKLQRMFQDMQISKDLNTGFREHAEKSEMKVLDSQYAILGTGFWPLQVPNTAFNPPAVISEDCERFTRFYKNKHDGRKLTWLWQLCKGEVRATYCKQSKVPYTFQVSMYQMAILLMFNDGDRHTHEEIASTTSMNSETMDPVLGLLLKAKVLLADSDKPGPGTTYSLNYDFKNKKVRVNLNIGLKTEQKQEEVETNKTIEEDRKLLLQSAIVRIMKARKRMKHNQLVSETIGQIKGRFVPKIPDIKKCIEILLDKEYLERLEDDDLGYLA

SEQ ID NO: 13799 - DNA, 2493 bp, Magnaporthe grisea 70-15
  CDS (1)..(2493)
atgcagcgtcagaacaagatacggccgccgaagcggtcactccgacatgaaacagacgaattcgaccagcagtgggacgtcctcagagaggcgctcacggacattcacaacagaaattccagccgcctcttattcgagcatttataccgagccagctacaagatcgtgcttaagaagcaaggcgagcgtctctacacgctcgtgcaagagtttgaggggaaatggtttgccgaacaggttatcccacagctccaagccatgatcgcccccaacctgatcaatgttgcggtggaggctggtaccagtgcccatgagcgccgcgagatgggtgacacgttcatgaagggcctcaaagaagcatgggagaaccatcggatgtcgatgaacatggttgctgacatcttaatgtacctggataagggtttccttaaggagagccggggaacctcgatatttgtcacgacgataggcttgtttcgtgaccaccttgtcaaccctaataccgtcgtcggccacgacaggacgttcagcctcttcgatatccttagcactgtcatactcgaccacatagacatggagcgcgagggagacgtcatcaaccgttctctcatccacagctgtgtcaagatgctggaagatctctacgaaaccgacgaggagatggatgccgatcgattgtatctcgttcgcttcgagccacacctactcgaggcaagtcggacgttctacagaagtgaggctctgaagttattgcggaacggtgacgccagcatttggatacgccagacacataggaggttattggaggaggaggacaggtgcaagacgaccctgtccaccttgtcgatcgaaaagatgacgcgagcggtagaggcggagctgatctctgcacatctcaacgatttccttgcactagagaacaatggcttgaggcaaatgctggacgacgatcgcgttgaggatttggccatcctctatcagctcgtcgccagggtagacccgtcaaaggatttgttgaagaagggtgttctcaaccgcatcctggctctaggtgctgagattgagaagaatctcagcacgatagatttttctgtcgctcaaggcgacgcagcagagaatccagcagcagaaaagcccaagtctcaggctttgtcacagcaagctcagcagactgccgcagccattaaatgggtccatgatgttttggacttaagggcaaaatttgatgttatttgggagaaatcattcgctcaagacccgggcctacaaactaccatgaccaaaggcttttcagatttcatccaccagtttgggagaagctctgagtttgtttcgctctacattgacgagaatctgaagcgaggcattcgcggcaagtcagacttggaagtcacagccatcttggataggtcgatcgtcatgatcaggtacctaaaggataaggatctatttgagagatattaccagaagcatcttggacggaggctcctacacagcagagcctccagcgaggaagcagagaagcagctcattaccatgatgcagctggagttgggcaaacacttcacttccaagttcgaaggcatgttcaaggacatcactatatcagaagagctgtcgaccaagtatggcgagcacattcgctcgctgggtgacgtggatgtccaccacaaaccgatcgacttggctatcagcgtcttgaccagcaacagctggccaccagatgttatgggccgccctgcccaagtaggacgtggtgatgggccgcctgcagtggactgcaactacccacccgagatcaagcgtttgcaagacagctttttcaagttctacctgaaggatcgcagtggcagggtcttgacctggataggttcagcgggcagcgcagatattaaatgcgtatttccgccagtcaagggcatgtcaggcccgcttagtcgggagcgacgatatgaactaaacgtatcgacttatggaatggtcgttttgatgctgttcaacagcctcgaagacggcgagactctaagtttcgaagacattcaggcagaaaccagtatccctcccaaagatttgtctagggctcttgcatctttgtcgatcaaccccaaagctcgagttttactcaaggaccctgcgaccaagactatccgacctggcgacaagttctcattcaatgcaggctttgtcagcaaggcaatcaagatcaaggcgccggtcataaactcgcagtccaaggtcgaaggtgacgaagagcgtcaacggactgaggacaagaatgatgagacacgacgacatatgatcgatgcagccatagtgcgcataatgaagtctcgcaaggagctcgcacacaacgcccttctcgccgaggtcattgggcagcttgtttcaagattccagccagacgtagccatgatcaagacccgaatcgaggatttgattgctcgagagtatctagagcgtctagacgattctggttacaagtacatggcatga

SEQ ID NO: 13800 - protein, 830 aa, Magnaporthe grisea 70-15
MQRQNKIRPPKRSLRHETDEFDQQWDVLREALTDIHNRNSSRLLFEHLYRASYKIVLKKQGERLYTLVQEFEGKWFAEQVIPQLQAMIAPNLINVAVEAGTSAHERREMGDTFMKGLKEAWENHRMSMNMVADILMYLDKGFLKESRGTSIFVTTIGLFRDHLVNPNTVVGHDRTFSLFDILSTVILDHIDMEREGDVINRSLIHSCVKMLEDLYETDEEMDADRLYLVRFEPHLLEASRTFYRSEALKLLRNGDASIWIRQTHRRLLEEEDRCKTTLSTLSIEKMTRAVEAELISAHLNDFLALENNGLRQMLDDDRVEDLAILYQLVARVDPSKDLLKKGVLNRILALGAEIEKNLSTIDFSVAQGDAAENPAAEKPKSQALSQQAQQTAAAIKWVHDVLDLRAKFDVIWEKSFAQDPGLQTTMTKGFSDFIHQFGRSSEFVSLYIDENLKRGIRGKSDLEVTAILDRSIVMIRYLKDKDLFERYYQKHLGRRLLHSRASSEEAEKQLITMMQLELGKHFTSKFEGMFKDITISEELSTKYGEHIRSLGDVDVHHKPIDLAISVLTSNSWPPDVMGRPAQVGRGDGPPAVDCNYPPEIKRLQDSFFKFYLKDRSGRVLTWIGSAGSADIKCVFPPVKGMSGPLSRERRYELNVSTYGMVVLMLFNSLEDGETLSFEDIQAETSIPPKDLSRALASLSINPKARVLLKDPATKTIRPGDKFSFNAGFVSKAIKIKAPVINSQSKVEGDEERQRTEDKNDETRRHMIDAAIVRIMKSRKELAHNALLAEVIGQLVSRFQPDVAMIKTRIEDLIAREYLERLDDSGYKYMA

SEQ ID NO: 13801 - DNA, 2493 bp, Gibberella zeae PH-1
  CDS (1)..(2493)
atgatttcagggcgtggaggagctggcactcgggggaggatcagaccccctcgtcgtattgtgcgtgccaccgagtctggagagggttccgattttgaggtatgctggaaaatgctcagggaagcactcgacgacatccacaggaaaaactgcagcaagttatctttcgaagaactgtaccgagcggcctacaaaatcgtccttaagaaaaaaggcgagcttctctacgaaaaggtgaaaggctttgaggaacagtggttcaacgaccatgttatccctgaaatcaaagagctattcagcaagagtctgcttgacagcggaagcagatcgattcacgagaagcgacagactggggagagattcctcaaaggtctacgcgacaaatgggaagatcacaacatgtctatgaacatgacggctgatattctgatgtacctcgatcgtggctatacccagcttgaagcacagcgaatccccatcttcgccaccaccatcgcgttgttccgagagcatatccttcgatcatccctaaataccaaccacaaggtcatcgatgtcctgatatcggttatcctggagcagatcaacatggagcgcgaaggagatatcatagacagaaatcttattcgaagctgcacccgaatgctcagcagtctctacgaaaccgaagacgagaaagacagcgacaagctatactccacagtcttcgagccccgttttcttgaaaatagtaaagcctactatgccgccgaatgcgagaagctactacgcgaatcggacgccggggcctggttgcgacacacccaaacgcggctgaatgaggagatcgatcggtgcggaaccacaatagagctggagacactgccaaaggtcacgtcgaccattgatcaagagcttataatcaagcatctgggcgagtttttagcactcgaagggagtggtttgaagtggatgattgacaacgacaaggtagaagagctctctatcctctatagactcgtctctagagtcgattctacaaagacatcgttgcgggaaattctacagcgccgtgtggttgagcttggattggacattgaaaaggtcctgaagaacactgacttctcgactggtcaaggtgatggagaagaaggcgaaggcgacaaggcaaagaccttgaaccccgctgcgcagcagactgctgctgcaataaaatgggttgatgatgttcttcgtctaaaggacaagtttgacaatctctggacccgctgcttccaggacgacctcatcatccaaagcgccctgaccaagagcttttccgacttcattaacatgttcaatcggagctctgaatatgtctccctgtttatcgacgacaacctcaaaagaggtatcaagggaaagacagaagcggaggtggatgttgttcttgaaaaggccattgttctgatcagataccttcaagacagggatctgttccaaacatactaccagagacatctggccagacgactacttcatggcaagtccgaaagccatgatgttgagaagcaaatcatctctcggatgaagcaggagcttggacaacagttcaccagcaaattcgaaggcatgttcagagatctggtcacgtccacggagcttactaccggctaccgtgatcacatccgcagcgttggagacggtactaagaccatcgatcttaacattaacgttctcaccacaaactactggccacccgaggtcatgggacgcaccgcgcagattggcgacggttctcgcgttacttgcacgtacccacctgagctggaccgattgcagacaagcttcgagcagttctacctaactaatcgtaatgggcgcaagcttacctggattggcacaactggaagctctgatatcaagtgcactttcccggccattgctgggaagtctggccctctatcacgagagcgcagatatgaaatcaacgtgccgacctttgccatggtcgtcatgcttctttttaacgatctggaagatgatcagtcgttgacatttgaggagattcaggccaagacaaacatctcaaaccaggacctcatgcggacgctgacggccattgcggtagcgcccaagtctcgtgtcctgctaaaggatccagccaacaaatcagttaagccgggcgacaagtttacgttcaacgcatcgttccaaagcaagactatccgaatcaaagcacccatcatcaatgcggtgtcaaaggttgaagacacgacagagaggaagactactgaggaaaagaacaaccagacgagagcccacattgttgacgcagcaattgtgagaatcatgaaatctcgaaaggagctctctcattctcagctgaccagcgaagttctcagccagttgtcgggtcgctttaagcctgaggtctccctcatcaaaaagcgtatcgaagatcttatcgccagagaatacctcgaacgtcctgatgaagacggcgcaccatctttgtaccgttatgttgcataa

SEQ ID NO: 13802 - protein, 830 aa, Gibberella zeae PH-1
MISGRGGAGTRGRIRPPRRIVRATESGEGSDFEVCWKMLREALDDIHRKNCSKLSFEELYRAAYKIVLKKKGELLYEKVKGFEEQWFNDHVIPEIKELFSKSLLDSGSRSIHEKRQTGERFLKGLRDKWEDHNMSMNMTADILMYLDRGYTQLEAQRIPIFATTIALFREHILRSSLNTNHKVIDVLISVILEQINMEREGDIIDRNLIRSCTRMLSSLYETEDEKDSDKLYSTVFEPRFLENSKAYYAAECEKLLRESDAGAWLRHTQTRLNEEIDRCGTTIELETLPKVTSTIDQELIIKHLGEFLALEGSGLKWMIDNDKVEELSILYRLVSRVDSTKTSLREILQRRVVELGLDIEKVLKNTDFSTGQGDGEEGEGDKAKTLNPAAQQTAAAIKWVDDVLRLKDKFDNLWTRCFQDDLIIQSALTKSFSDFINMFNRSSEYVSLFIDDNLKRGIKGKTEAEVDVVLEKAIVLIRYLQDRDLFQTYYQRHLARRLLHGKSESHDVEKQIISRMKQELGQQFTSKFEGMFRDLVTSTELTTGYRDHIRSVGDGTKTIDLNINVLTTNYWPPEVMGRTAQIGDGSRVTCTYPPELDRLQTSFEQFYLTNRNGRKLTWIGTTGSSDIKCTFPAIAGKSGPLSRERRYEINVPTFAMVVMLLFNDLEDDQSLTFEEIQAKTNISNQDLMRTLTAIAVAPKSRVLLKDPANKSVKPGDKFTFNASFQSKTIRIKAPIINAVSKVEDTTERKTTEEKNNQTRAHIVDAAIVRIMKSRKELSHSQLTSEVLSQLSGRFKPEVSLIKKRIEDLIAREYLERPDEDGAPSLYRYVA

SEQ ID NO: 13803 - DNA, 2445 bp, Apis mellifera
  CDS (1)..(2445)
atgtctaggctcgggggaactcaggttctagccacagcacaggtgaagaggacggctgctgatcacgcagcggtgttaaactttggtgctgcaaaacgcagcaagctgtccgccgttgcggtcacggagatcaacgagattgaaaacatgacggatacggctgcagccacgactgatacccaaaagagagccaatttctcagctttaactgttgggaatccaaacggcgttaacaagatttcaccaagtttggcaagcgcaaaacctggtacagctagaaaactcgtcatcaaaaattttaaaaataaaccaaaattaccagaaaattatcaagaacagacatgggaaaaattacaagaagctgtaatagcaatacaaactagcaagagtattcgttattcattagaagagctttatcaagcagttgaaaatatgtgtaatcataaaatggcatccacattatatacaaagctaacaaggttaacagaagcacatgtgcaagcaaatatagaacaatttttagcagaatcaatggataggcatatattcttaaaaaaaatgaatgaatgttggcaatcacattgcagacaaatgattatgattagaagtatttttctatatttggatagaacatatgtattacaaaatccaagtattttatctatttgggatatgggtttacatttgtttagagtgtatattgttttgaataacttagttcaaacacgtacagtagaaggattacttatgctcatagaaaaagaacgtcaaggtgatacagtggatagaacacttcttaaatcattattaagaatgttatcagatctacaaatctaccaagatgcctttgaaactaaatttttggttgctactgaaagactatatgctgctgaaggtcaacgactgatgaatgaacatgatgttcctgagtacttagcacatgtggacaaacgacttcaagaagaaaatgaacgtttgttacattatttggatgcatctacaaaatggtccttaatacatacggtagaaaaacaattattgtctgaacatattaccagcattttacaaaaaggattaagtggtttactggatgaaaatagaattaatgatttatctttactttataatttatatagtcgagtaaaaaatggccttgtagaactttgtctaaactttaattcttatattaagaaaaaaggtaaaactatagttatagatcctgaaaaagataaaactatggttcaagaactcttagatttcaaagataaaatggacaatatagttaacacatgttttcataaaaatgagaaatttgcaaacagtttaaaagaagcttttgaagcttttattaatcaacgtgcgaataaacctgctgaattaatagcgaaatttgttgactgcaaacttagagcgggtaataaagaagcgacagaagaagaattagaaagattattagataaaatcatggtactgtttagatttatacatggaaaagatgtatttgaagcattttataaaaaagatttagctaaacgtttattagttggtaaatcagcttctgttgatgctgaaaaatccatgttatccaaattaaaacaagaatgtggaggaggttttactagtaaattggaaggaatgtttaaagatatggaacttagtaaagatattaatattgcttttaaacagtatgcaggaaatttgcaaagtgaattgtctgctagtaatttggatttgactgtttcgatacttacaatgggttattggccaacatatcctgtaatggaagtaacattaccaccagaaatggttcaatatcaagatgtatttaataaattttatttaggaaaacatagtggtagaaaattgcaatggcaacctactttaggacattgtgtattaaaagcttggtttaatcagggcaacaaagaacttcaagtttcattatttcaagcattggtgttaattttgtttaatgatgctgacaatttgtccttggaagatataaaagcagcaacaaatatagaagatggtgaacttagaagaactttacaatctttagcttgtggaaaagccagagtgttacaaaaaaatccaagaggaagggatgttgcagataacgatagatttgtttttaatgcagactttacaaataaattattcagaattaagataaatcaaattcaaatgaaagaaacgaatgaggaacaaaaagctacagaagaaagagtatatcaggatagacaatatcagatagatgcagctattgttagaattatgaaaatgagaaaaacactttcgcacaatttgttgattagtgaattatacaatcaacttaagtttcctgtaaagcctgcagatttgaaaaagagaattgaatctctcatagatagggattacatggaacgagataaagataatgcaaatgagtacaattatgttgcataa

SEQ ID NO: 13804 - protein, 814 aa, Apis mellifera
MSRLGGTQVLATAQVKRTAADHAAVLNFGAAKRSKLSAVAVTEINEIENMTDTAAATTDTQKRANFSALTVGNPNGVNKISPSLASAKPGTARKLVIKNFKNKPKLPENYQEQTWEKLQEAVIAIQTSKSIRYSLEELYQAVENMCNHKMASTLYTKLTRLTEAHVQANIEQFLAESMDRHIFLKKMNECWQSHCRQMIMIRSIFLYLDRTYVLQNPSILSIWDMGLHLFRVYIVLNNLVQTRTVEGLLMLIEKERQGDTVDRTLLKSLLRMLSDLQIYQDAFETKFLVATERLYAAEGQRLMNEHDVPEYLAHVDKRLQEENERLLHYLDASTKWSLIHTVEKQLLSEHITSILQKGLSGLLDENRINDLSLLYNLYSRVKNGLVELCLNFNSYIKKKGKTIVIDPEKDKTMVQELLDFKDKMDNIVNTCFHKNEKFANSLKEAFEAFINQRANKPAELIAKFVDCKLRAGNKEATEEELERLLDKIMVLFRFIHGKDVFEAFYKKDLAKRLLVGKSASVDAEKSMLSKLKQECGGGFTSKLEGMFKDMELSKDINIAFKQYAGNLQSELSASNLDLTVSILTMGYWPTYPVMEVTLPPEMVQYQDVFNKFYLGKHSGRKLQWQPTLGHCVLKAWFNQGNKELQVSLFQALVLILFNDADNLSLEDIKAATNIEDGELRRTLQSLACGKARVLQKNPRGRDVADNDRFVFNADFTNKLFRIKINQIQMKETNEEQKATEERVYQDRQYQIDAAIVRIMKMRKTLSHNLLISELYNQLKFPVKPADLKKRIESLIDRDYMERDKDNANEYNYVA

SEQ ID NO: 13805 - DNA, 2334 bp, Apis mellifera
  CDS (1)..(2334)
atgtcagggcatagaggcggaggaggagctgggagccatcaaggaggcccagcaggtcttaaacaaatagatttagatcaaatttggggagatcttcgtgagggtattgaacaagtttacaacaggcaatgtatgtctaaaccaagatatatagaattgtacacacatgtatataattattgcacaagtgttcatcaacaattaactagaacatcgaccaaaagtaagaaaggacaaatttctcaaggaggtgcacagttagttggtttggagttatataaacgtttacgtgactttcttagaaattaccttataagtttattaaagcatggaattgacttgatggatgaagatgtattacagttctatacaagacaatgggaagaatatcaatttagtagtaaagtattgaatggtgtatgttcatatctaaatcgacattgggtacgtagagaatgtgaagaaggtcgtaaaggaatctacgaagtatatcaatcagctttggttacatggcgtgataacttattcaagcatttaaatagacaagttactaatgcagtacttaaattaattgagagagaacgcaatggtgaaacaataaatacacgtttagtcagtggcgtaatcaattgttatgtagaattaggtatgaatgaagaagatcctggtgctaaaggacagaatcttactgtttacagtaattcttttgaaaatgtcttccttgaagatacagaaaggttttacactcgtgaaagttctgagttcctccgacaaaatccagttacagaatacatgaaaaaggcagaacaaagattattagaagaacaaaaacgagttcaagtatatttgcatcaaacaacccatgataaattagcaaaaacatgtgagagagtgttaattgagaaacatttagatatttttcattctgaatttcaaaatctcttggatgctgataagaacatagacttaggtcgaatgtatcaattagtagcaaggattccaaatggacttggcgaattaaggaatcttttagaaggtcatatagctaatcaaggacttggagctattgataaatgtggtgattctgcagccaatgatccaaaggtttatgtaaacacaattctggaggttcataagaaatataatgctttagtacttgttgcatttaataatgatagtggttttgtggcagctcttgataaggcttgtggaagatttattaacagtaattcagtaactagagcagcaaatagcagcagtaaatcaccagaattattagcaaaatactgtgacctgttattaaaaaaaagtagtaaaaatcctgaagaagctgaacttgaagatacattgaatcaagttatggtggtatttaaatatatagaagacaaagatgtgtttcaaaagttttatagtaaaatgctggcaaaaagattagtacaacatatgtctgccagtgatgatgcagaagcttctatgatttctaaattgaaacaagcttgtggttttgaatacacctcaaaattgcaacgaatgtttcaggatattggtgtatctaaggacttaaatgaacaatttagaaggcatttgacaaattctgctgaaccattggatatagatttcaatatacaagtcctgtcttctggctcctggccatttcaacagtcttttacgttttcattgccaacagagctagaaagatctgtacataggttcactaccttctatagttcacaacatagtggaagaaagttgaattggttgtacaatatgtctaaaggagaattacatacaaattgttttaaaaatagatacacattacaagcatccacatttcaaatggctgttttattacaatataatggatccacagtgtggacgattcaacaattacatgatgctacacaaataaaaatggattttttgcttcaggttattcaaatactcttgaaagctaagctattaacggcagctactgatgacgaagctgaattgacgccactgtcaacagtggaactatttacaggatataaaaacaagaaactgagagtaaatattaatataccaatgaaaacggaattaaagattgaacaagaaacaacacaaaaaaatatagaagaagatagaaagctcttaattcaggcagctattgttaggattatgaaaatgagaaaagtattgaaacatcagcaattggtagctgaagtattgaatcaattaagctctaggttcaaaccaagagtacatgtcattaagaaatgtatagatattttaattgaaaaagaatatctggagcgcacagagggccaaaaggacacttatagctacctggcatga

SEQ ID NO: 13806 - protein, 777 aa, Apis mellifera
MSGHRGGGGAGSHQGGPAGLKQIDLDQIWGDLREGIEQVYNRQCMSKPRYIELYTHVYNYCTSVHQQLTRTSTKSKKGQISQGGAQLVGLELYKRLRDFLRNYLISLLKHGIDLMDEDVLQFYTRQWEEYQFSSKVLNGVCSYLNRHWVRRECEEGRKGIYEVYQSALVTWRDNLFKHLNRQVTNAVLKLIERERNGETINTRLVSGVINCYVELGMNEEDPGAKGQNLTVYSNSFENVFLEDTERFYTRESSEFLRQNPVTEYMKKAEQRLLEEQKRVQVYLHQTTHDKLAKTCERVLIEKHLDIFHSEFQNLLDADKNIDLGRMYQLVARIPNGLGELRNLLEGHIANQGLGAIDKCGDSAANDPKVYVNTILEVHKKYNALVLVAFNNDSGFVAALDKACGRFINSNSVTRAANSSSKSPELLAKYCDLLLKKSSKNPEEAELEDTLNQVMVVFKYIEDKDVFQKFYSKMLAKRLVQHMSASDDAEASMISKLKQACGFEYTSKLQRMFQDIGVSKDLNEQFRRHLTNSAEPLDIDFNIQVLSSGSWPFQQSFTFSLPTELERSVHRFTTFYSSQHSGRKLNWLYNMSKGELHTNCFKNRYTLQASTFQMAVLLQYNGSTVWTIQQLHDATQIKMDFLLQVIQILLKAKLLTAATDDEAELTPLSTVELFTGYKNKKLRVNINIPMKTELKIEQETTQKNIEEDRKLLIQAAIVRIMKMRKVLKHQQLVAEVLNQLSSRFKPRVHVIKKCIDILIEKEYLERTEGQKDTYSYLA

SEQ ID NO: 13807 - DNA, 2367 bp, Yarrowia lipolytica CLIB122
  CDS (1)..(2367)
atggtaaacacaccaccacttccccgcgccgatgatatcgacgccacctggaagtacattgaggacggcgtgggccaggtgctccgggatgacctggcacacggcgcagggctgtcatcgcagatgtacatgaacctgtactcggcgatccacaactactgcgtttcgcgagacagcaaccgaagcgtgagtctggccagcagaggaggagtcggatcaagcacgcggggcgcccagctgattggcgcagacctgtactacaagctcaagggctttctggaatcgcatctcagctcgctggaggctgaggcccagcccatgagcggtggcaacctgctgctgtactacatcaagtgctgggacaagtacacggtgggtgcgcagtacatcaaccacattttcaactacctgaaccgacactgggtcaagcgagagagagacgacggtcgcaagaacgtggtggacgtcaacaccatgtgtttgtgtgcctggaaggagtgcttcttcgatcccctggagaagaaggtcattgatgccctgctggagcagttcacccggctgcgaaacggcgaatctacgggcaccatcgacatccgaaaggtcgtgtactcgttggtgtcattgggtctggaccagcttgacatcaagcgggttaacctgcaggtctacgagcaggccttcctgcatcctttcatccagcacaccaaggactactacaccaaggagtccgccctgttcctccaagagaacactgtggtcgactacaaccgcaaggctgagcagcgtctggcggaagagaagggccgagttgacgtctacctgcatccgtcttccgagcagcgggtgattgagacctgccacgagtgtctcatcgccgaccacgcagaggtcatccgatccgagtttggctcactgctccagggctaccgagaggacgacattcgacgtgtgcacgtactgctgagcaaggtggacggcgccttggaccctattctgcccgttttcgagtcctacgttaaacaggaaggagagaatgctgtcaaacagctggccaaggacctcactggcaccgtcgacgcttcgacttacgtcgacacactcattggtgtctacgagcgctacgtgcatctggtggaggtggccttcagcaatcacacatcgttgcacaaggttctggacgctgcatgtttggccttcatcaacaagaacgctattgccactccagattcgcctagcaacaagtcccgcgactccaaaaccccagagctgctggcttcctactgcaacacgctacttaagaagaccaccaagaccaccgaggacttcgatctcgaggcgaagctcgagaacgccattgtcattttccggttcctggaagaaaaggacgccttccagaagcattacactcgtaacctggcccgacgtcttgtctacaactcgtctgcatccgacgatgccgagcggtccatggtcaacaagctcaaaaacgagtgcggtatggagtacacgggcaagctcaacaaaatgttccaggacatttccgtatcaggcgagctgcaggaggagttcaaggagcgagtacaacagaagcgacaggacgcggctgcctcaggcggagaggccaatctcgtcgacttctcgccaaccatcattgccgagggatgctggccactgccctccgtcaaggacggcttccgactgcccaatgacctcaccaagacgtacgaggcgttcacccagtactatcaggcaaagcaccagggccgaaagctcaagtggctgtggaacttcaccaagggcgatgtcaagatccacaccaagggctccaagattggctattcggtaacagcctccatctaccagattgccattcttctggcctacaacgacgccgatgttctgtctgtggccgatctgcaggagatcaccggtctcagcaacacatacctgcatggttctctgcacttgatcctcaagtccaagtttctgttggttgagggtgtgtctggcgaccccaaggacgtggagctcacgcctgagacgcgaatcgtcttcaaccaggacttcaagtccaagaagatccgaatcaacatcaacggagtcatcaagacggaggctaaggctgaggctgaggagacaaagaaggcaatcgaggaggaccgaaagtggttcttgcaagccacgattgttcgtgtcatgaaggctcgaaagactctcaagcatactgcgctggttcaggaaaccattgtgcagtccaagaagcggttccaccccaaaattggcgagatcaaaaaggtgattgacgatctgattgagagagagtatctgacccgaatcgagcaggacaagtacgaatacgctgcataa

SEQ ID NO: 13808 - protein, 788 aa, Yarrowia lipolytica CLIB122
MVNTPPLPRADDIDATWKYIEDGVGQVLRDDLAHGAGLSSQMYMNLYSAIHNYCVSRDSNRSVSLASRGGVGSSTRGAQLIGADLYYKLKGFLESHLSSLEAEAQPMSGGNLLLYYIKCWDKYTVGAQYINHIFNYLNRHWVKRERDDGRKNVVDVNTMCLCAWKECFFDPLEKKVIDALLEQFTRLRNGESTGTIDIRKVVYSLVSLGLDQLDIKRVNLQVYEQAFLHPFIQHTKDYYTKESALFLQENTVVDYNRKAEQRLAEEKGRVDVYLHPSSEQRVIETCHECLIADHAEVIRSEFGSLLQGYREDDIRRVHVLLSKVDGALDPILPVFESYVKQEGENAVKQLAKDLTGTVDASTYVDTLIGVYERYVHLVEVAFSNHTSLHKVLDAACLAFINKNAIATPDSPSNKSRDSKTPELLASYCNTLLKKTTKTTEDFDLEAKLENAIVIFRFLEEKDAFQKHYTRNLARRLVYNSSASDDAERSMVNKLKNECGMEYTGKLNKMFQDISVSGELQEEFKERVQQKRQDAAASGGEANLVDFSPTIIAEGCWPLPSVKDGFRLPNDLTKTYEAFTQYYQAKHQGRKLKWLWNFTKGDVKIHTKGSKIGYSVTASIYQIAILLAYNDADVLSVADLQEITGLSNTYLHGSLHLILKSKFLLVEGVSGDPKDVELTPETRIVFNQDFKSKKIRININGVIKTEAKAEAEETKKAIEEDRKWFLQATIVRVMKARKTLKHTALVQETIVQSKKRFHPKIGEIKKVIDDLIEREYLTRIEQDKYEYAA

SEQ ID NO: 13809 - DNA, 2304 bp, Apis mellifera
  CDS (1)..(2304)
atgaagagcagtgctatgcttaagaaagaaagcaaaatgcgcatacgtgcttttccgacaactatggatgaaaagtatgtagaaagtatttgggcactattaaaaaatgctattcaagaaattcagaagaaaaataattcagggcttagttttgaagagctttatcgaaatgcttatactatggttcttcacaagtatggtgaacgtttatatacaggtttaaaagaagttgtaacacatcatttagaaaataaagtcagagaagatgtattaagatctcttcacaacaattttcttcaaacattaaatcaagcttggaatgatcatcagacatctatggtaatgataagagatattttaatgtatatggatagagtttatgtgcaacaacatgatgtggacaatgtgtataatttaggacttatcatatttagagatcaggtggtcagatatggatgtgttagagatcatttaagagaaactttactaggtatggtagcaagagaaagaagaggagaagttgtagatcgcattgcaataaaaaatgcctgccaaatgttaatgttacttggcattaacagtcgtcaagtttatgaggaagattttgaaaggccttttttacaacaaagtgctgaattttatagaatggaatctcaaaaatttttggctgaaaatagtgcatcagtatatataaaaaaagttgaagctagaatttgtgaagaatcagaaagagcaaaacattatttagatgaatctactgaaccacgaatagtagaagttgtagaagaagaactaattaaaattcatatgaaaactattgtcgagatggaaaatagtggtgtagtacatatgctcaaaaaccaaaaaactgaagatcttggctgcatgtataaattattttcgagagtttcggatggtttacgtactgtatgcgattgtgtttctcaatttcttaaagaacaaggccgtgccatggttcaagaggaacatgaatcaacgacaaatgcagttctttttattcagaatttgctagatttaaaagatcgtttcgatcattttcttcattattcgtttaataatgataagaattataaacaaatgattgcatctgactttgaatactttctcaatttaaatacaaaaagtccagaatatctttcgctcttcattgatgataagctgaaaaaaggtgttaaagggatgacagaacaggaaatcgaaggtatcttggataaaactatggttttatttagatttcttcaagaaaaagatgtatttgaacgatattataaacagcacttagctaaacgtcttcttttgaataaatctgtatctgatgatagcgaaaaaaacatgatatccaaacttaagactgaatgtggatgtcaattcacatcaaaattggagggaatgttcaaagatataacagttagtaatactattatggatgaatttaaagatcatgtccttacatccaatacaaacttacatggagtggatataagtgtaagagttttgacaaccggtttttggccgacacaatctgcaactccaaaatgtagcatgccagctgctccacgagatgcttttgatgctttccgacgtttttatcttgctaaacatagtggtcgacaattaacgttacaaccacaattaggttctgcggatttaaatgctgtatttcatggaccacgaagagaagaaagtagttgcggtggcttagatacaccatcgtcttcaagttccagttgtggaaataccagaaaacacattattcaagtatcaacttatcaaatgtgtgtattaatgctttttaacaaaagagaaaaattgacgtacgaggaaattcaaggtgaaaccgatattccagagagagacttggttagagcattacaatctcttgcaatgggaaaagctacacaaagagtgttattaaagcatcctcgtacaaaggaaatagaaccttcacattatttttgtgttaacgacagttttaccagtaaattacatagagtaaagattcaaacagtagctgcaaaaggcgaatcagaacctgaaagaagagaaactcgcaacaaagtagatgaagacagaaaacatgaaatagaagcagctattgttcgtattatgaaagatagaaagcgtatgccacacaatatacttgtaactgaagtaacagaacaattaagaggtcgatttttgccgtcgcctgtaataattaaaaaacgtattgaaggtttaattgaacgtgaatatttggctcgtacgccggaagataggaaagtatatacgtatgttgcttaa

SEQ ID NO: 13810 - protein, 767 aa, Apis mellifera
MKSSAMLKKESKMRIRAFPTTMDEKYVESIWALLKNAIQEIQKKNNSGLSFEELYRNAYTMVLHKYGERLYTGLKEVVTHHLENKVREDVLRSLHNNFLQTLNQAWNDHQTSMVMIRDILMYMDRVYVQQHDVDNVYNLGLIIFRDQVVRYGCVRDHLRETLLGMVARERRGEVVDRIAIKNACQMLMLLGINSRQVYEEDFERPFLQQSAEFYRMESQKFLAENSASVYIKKVEARICEESERAKHYLDESTEPRIVEVVEEELIKIHMKTIVEMENSGVVHMLKNQKTEDLGCMYKLFSRVSDGLRTVCDCVSQFLKEQGRAMVQEEHESTTNAVLFIQNLLDLKDRFDHFLHYSFNNDKNYKQMIASDFEYFLNLNTKSPEYLSLFIDDKLKKGVKGMTEQEIEGILDKTMVLFRFLQEKDVFERYYKQHLAKRLLLNKSVSDDSEKNMISKLKTECGCQFTSKLEGMFKDITVSNTIMDEFKDHVLTSNTNLHGVDISVRVLTTGFWPTQSATPKCSMPAAPRDAFDAFRRFYLAKHSGRQLTLQPQLGSADLNAVFHGPRREESSCGGLDTPSSSSSSCGNTRKHIIQVSTYQMCVLMLFNKREKLTYEEIQGETDIPERDLVRALQSLAMGKATQRVLLKHPRTKEIEPSHYFCVNDSFTSKLHRVKIQTVAAKGESEPERRETRNKVDEDRKHEIEAAIVRIMKDRKRMPHNILVTEVTEQLRGRFLPSPVIIKKRIEGLIEREYLARTPEDRKVYTYVA

SEQ ID NO: 13811 - DNA, 2256 bp, Aspergillus nidulans FGSC A4
  CDS (1)..(2256)
atggcgcctctaatgccccaggccccccacaaggatgacttggaagaaacatgggtattcctagagaacggcatcaacaatgtcatggtcaaactggaggacggggtggacatgaagaactacatggccctatacacagcggtccacaacttctgcacctctcacaaagctgtcagcggtcaagccatacaagcacagcgtggtgcacacttgctcggagaggagctttatcggaaacttggagaatacttgtcgcgccatcttgagtgggtccacggagaatcgatgggtcatacggatgaagctctactttcattttatattcgggaatggcaaagatacctgaaccgccactgggtcaagcgagaaatcgatgaagggaaaaagaacgtatatgatgtgtatactcaacacttggtaaagtggaaggaggatttcttcctcaaggtgcatgaaaaggtcatgggcgcggttcttaagcttgtcgaaaagcaacggaatggggagaccattgagcaatcgcggattaagagcattgttgattcatttgtctctctcggacttgatgaaactgaccccacgaagtccacccttgaaatttaccgctattacttccaacggcctttcctcgaagctaccaggatctattatgaggatgagtcgcgtcagtttgtggcggacaacagcgttgtggagtacatgaagaaagcagaaatccgtctcgaagaggagaaagcacgtgttggactctatttgaacaacgatatttcaaaagatctaaccagcacctgtttggatgtacttgtcactgcgcactcggagctcctccgtgacgaattccaaccgctgctcgacaacgaacgtcaagatgatctcgcccggatgtaccggcttttgtcacgaatcaaagatgggctggaccctcttcgcacaaaattcgaagcacacgtaaggagggctggtttgtctgcagttgagaaggttgctgctgaaggtgactccttcgagcccaagatgtacgtcgatgcattgctgtcggtgcacaccagataccacagtctcgtcaaggaagctttcaatggcgagtccgaatttgtccgctcgcttgacaacgcttgtcgcgagtttgtaaatcgcaacaagatctgcaagtccgggtctacgaagacaccagaattactagccaagtacacggattctctgctgaagaggggatcaaaagctgcggaggagtcagagctggaggagatgttggtacagatcatgaccgtcttcaagtacattgaagacaaggatgtcttccaaaaattctactccaagatgcttgctaagcgactagtccatgtgagctcagtatctgatgacgccgagactagcatgatcagcaaactcaaggaggcgtgtggttttgagtacacgaacaagttgcagcggatgttccaggatatccagatttcaaaggatctgaactcaagctacaaggactggcttgagaaatctttcttggatgatgatgaccgaaagaagcttgtggactcgcacttccaaattctcgggaccggtttctggccactcacggccccttcaacttctttccttgctccgcctgaaattgtcaaaacttctgagcgttttcagaagttctattgcgataagcataacggtcgaaagctaacctggctctggcagctgtgtaagggcgagctcaaggccaattacatcaagaacaccaaggtcccatacactttccttgtgtctacgtaccaaatgggcatcctccttctcttcaacgagagcgacacgttgacatactctgatatacaaaaggccactactctcacacctgaaatccttgatccaaacctgagcattttcttaaaggccaaggtccttaacattagtcctgaaggatctaaacccgggccagactcgaccttctccctgaactacaacttcaaaaataagaagatcaaggtcaatctcaacatccaaattaggtccgagcagaaggtcgagacggatgacacacataagacaatcgaggaagaccgcaagctcttgctccagtccgcaatcgtcagaatcatgaaatccaggaagaagatgaagcacgtacagcttgtgcaggaagtaattcaccaggtcaaatcacgcttccccccccaagtacccgacatcaagaagaacatcgaagcattgatggagaaggattacatcgagcgtctggacggcgatgaaatcgcttacattgcatga

SEQ ID NO: 13812 - protein, 751 aa, Aspergillus nidulans FGSC A4
MAPLMPQAPHKDDLEETWVFLENGINNVMVKLEDGVDMKNYMALYTAVHNFCTSHKAVSGQAIQAQRGAHLLGEELYRKLGEYLSRHLEWVHGESMGHTDEALLSFYIREWQRYLNRHWVKREIDEGKKNVYDVYTQHLVKWKEDFFLKVHEKVMGAVLKLVEKQRNGETIEQSRIKSIVDSFVSLGLDETDPTKSTLEIYRYYFQRPFLEATRIYYEDESRQFVADNSVVEYMKKAEIRLEEEKARVGLYLNNDISKDLTSTCLDVLVTAHSELLRDEFQPLLDNERQDDLARMYRLLSRIKDGLDPLRTKFEAHVRRAGLSAVEKVAAEGDSFEPKMYVDALLSVHTRYHSLVKEAFNGESEFVRSLDNACREFVNRNKICKSGSTKTPELLAKYTDSLLKRGSKAAEESELEEMLVQIMTVFKYIEDKDVFQKFYSKMLAKRLVHVSSVSDDAETSMISKLKEACGFEYTNKLQRMFQDIQISKDLNSSYKDWLEKSFLDDDDRKKLVDSHFQILGTGFWPLTAPSTSFLAPPEIVKTSERFQKFYCDKHNGRKLTWLWQLCKGELKANYIKNTKVPYTFLVSTYQMGILLLFNESDTLTYSDIQKATTLTPEILDPNLSIFLKAKVLNISPEGSKPGPDSTFSLNYNFKNKKIKVNLNIQIRSEQKVETDDTHKTIEEDRKLLLQSAIVRIMKSRKKMKHVQLVQEVIHQVKSRFPPQVPDIKKNIEALMEKDYIERLDGDEIAYIA

SEQ ID NO: 13813 - DNA, 2736 bp, Aspergillus fumigatus Af293
  CDS (1)..(2736)
atgcagcagaactcgagaggcgcccccgagcagaggagcggtaagcgcaagtcgatcggcaagaggaagctttctgatcaagaagaggcggcatttcggtctcagaattcgcaacagcatccgcagcagcaacaacaggcgaccatctccgagctcttatccaggaaccatacccacagcaagggttatcccccccaatcccctccatcgaacaagcgtcctcggctatcatcgccatcatcgcactcgcgggctccagtttcgtcacaggagcttcaaccgccagacaagatgtacaatttttcgaattcggaacatagaacaggtggagcgtttgcgcagagctccccggccaacacgacagtcaaaccccatttctcgaacacatcatcgcgtcagagcaattttacccctcataccggtgcaaaaaggcttgtggttaagaatctccggaccggttcgcggttgaatcaggattcctactttgacaaggtctgggcacagctggatgcagcgctgagcgccgtctttagcagcggaaagcccgagatttcactggaggagctctacaagggagcagagaatgtgtgtcgccagggaagagccgtggtgttgacccaacagctgcaggaccgatgccgagcgcacgtgtctgggagtctgcgggacgagttgctggcaaaggcagctgatgggagtaatgtggatacattgcgggctgtgattgacgcatggaacacttggaaatcgaagttgcgtcggtttgagtttgtctttcaaatgattgatgaagtcttccaggtcaccatccggtggatcttctactacctcgaccaatctttcctacttcattccaaagagtttccagttatccgtgaaatgggcttgatccagtttcggaatcacatattctccgaccctgtattacaaccgaaggttctacaaggggcttgtgacctagttgacgcagaccgcaatgaggatcatgctatgatggccgattcttctttgctccgaaatgctattgaactcttccatggacttgatgtctacacaacaagcttcgagcctctccttctttccgaatcgaagcgattcttcgtatcgtgggctcagcgagagtcctccggttatcttgccacatttgtggagaacggccataatctaatcgcgagagaagtcaaacgctgcgagctattctcgttgaaccgaagcaccaagcagaaactgtctgaacttctcgatcgtgtcttggtagcagatcaagagtcggtgttgcttaatgagaaggacgttcttgggttgcttcggactggcaacaagactgctctggagaagctctacaccctcttagagcgaaggcaactggggacgaaattgaagccagctttcaagaattatattgtggaagaaggctcgcagattgtctttgacgaggagaaggaggcggaaatggtagttagcttgctagaattcaaggcacagctggacgacacatgggttaactcgttccaccgcaatgaggagctgggtcatgccctgcgcgaagcttttgcaacctttatgaacaagagccggaaatcggaatctaccggcgggacagacaatgtcaagaccggcgagatgattgccaagtacgtagacaggctactgaaaggtggatggaagctggcatctgggcgcaatatggcggacgtgccgctggccgacgaggacgctgagattaaccgacaactggatcaagtgctggacctgtttcgattcgtcaacggcaaagcggtgtttgaggcattctacaagaacgacttggcccgtcggttattgatgggccgaagcgcaagtgacgatgcggagaagagcatgctagcaaggctcaagacagaatgcggttctacgtttacacacaatctcgagtccatgttcaaggatatggatgtcgcgcgagacgaaatggctgcatatgcctcgattcagcgcgaacggaggaaaccgctgccgatcgatctaaatgttagcgtgctctccgcctctgcatggccatcgtaccctgatgtgcaggtgcggattccaccggtcgttgccgaagcaattgatgactttgagaagttttactacaacaagtacaacgggcggaaactcagctggaagcatcagttggcgcactgccagctgcgagccaacttttcgcacggacagaaggagctggtggttagctcatttcaagcgatcgtactactgctgttcaacgacgttcccgagggcggaagcctgagctatgctcagcttcaggaagggacgaaactttccgaccaggagctccaacgcaccctccagtcgcttgcatgcgccaagtatcgggtcctcaccaagaagcccaagggacgagacgtcaaccctacggatgaattctcgttcaatgcgagctttacggacccgaagttccggatcaagatcaatcagattcaactgaaggagacgaaggaggaaaacaagaagacgcacgagcgggtggcggccgaccgacatctggagactcaggcggccatcgtgcgaatcatgaagagccgcaagcagatctcgcacgctgaactggttgcagaggtgatcaaggcgactcggagccgaggagtgttggatgtcgcggagattaaaaacaatatcgaaaaactgatcgagaaggattacatggagcgagacacggagaccagtcccaatatgtacaaatatgtcgcataa

SEQ ID NO: 13814 - protein, 911 aa, Aspergillus fumigatus Af293
MQQNSRGAPEQRSGKRKSIGKRKLSDQEEAAFRSQNSQQHPQQQQQATISELLSRNHTHSKGYPPQSPPSNKRPRLSSPSSHSRAPVSSQELQPPDKMYNFSNSEHRTGGAFAQSSPANTTVKPHFSNTSSRQSNFTPHTGAKRLVVKNLRTGSRLNQDSYFDKVWAQLDAALSAVFSSGKPEISLEELYKGAENVCRQGRAVVLTQQLQDRCRAHVSGSLRDELLAKAADGSNVDTLRAVIDAWNTWKSKLRRFEFVFQMIDEVFQVTIRWIFYYLDQSFLLHSKEFPVIREMGLIQFRNHIFSDPVLQPKVLQGACDLVDADRNEDHAMMADSSLLRNAIELFHGLDVYTTSFEPLLLSESKRFFVSWAQRESSGYLATFVENGHNLIAREVKRCELFSLNRSTKQKLSELLDRVLVADQESVLLNEKDVLGLLRTGNKTALEKLYTLLERRQLGTKLKPAFKNYIVEEGSQIVFDEEKEAEMVVSLLEFKAQLDDTWVNSFHRNEELGHALREAFATFMNKSRKSESTGGTDNVKTGEMIAKYVDRLLKGGWKLASGRNMADVPLADEDAEINRQLDQVLDLFRFVNGKAVFEAFYKNDLARRLLMGRSASDDAEKSMLARLKTECGSTFTHNLESMFKDMDVARDEMAAYASIQRERRKPLPIDLNVSVLSASAWPSYPDVQVRIPPVVAEAIDDFEKFYYNKYNGRKLSWKHQLAHCQLRANFSHGQKELVVSSFQAIVLLLFNDVPEGGSLSYAQLQEGTKLSDQELQRTLQSLACAKYRVLTKKPKGRDVNPTDEFSFNASFTDPKFRIKINQIQLKETKEENKKTHERVAADRHLETQAAIVRIMKSRKQISHAELVAEVIKATRSRGVLDVAEIKNNIEKLIEKDYMERDTETSPNMYKYVA

SEQ ID NO: 13815 - DNA, 2421 bp, Ustilago maydis 521
  CDS (1)..(2421)
atgtcagggtcgggattcacttcctcagggccctccgccacagcagctggaggtagccgtctacctgctgtgcacgatgcaaacgccacatgggctttccttgagccaggcattgatctcatgatgacccgtctgaaggaaggcatgacgtatccacgctacatggagctctacactgtcgcctacaaccatttcacctcatcttcgctcgcttcctcgtcgacggcgctcggccgttcctccggaccttttggctcaaaaggtggcaccgccctcgtcggcgctgaactttacaaccacttgactgtctacttccgcacacatcttgaacaggtgcgcaccgactctgacggcctctcggaagaggcactgctccgctactatgctaccgagtgggaccgctacacgaccggcgccaactttgttcaccgcctgtttgcatacctcaatcgctactgggtcaagcgcgagaaggacgagggccataagtacgtctacacagtctacatcttggcgctcgtgcagtggaaagagcacatgttccgctacattcagcagaagggccgcctggtgcaggctctgctcaagcaaatcgaaaagcagcgaaatggtgaaatcatcgaagcttcgctcgtcaagaaggtcgtggactcacttgtttcgctcggcctcgacgagtcggataccaaccgtcagaacctggatgtgtaccgccaagaattcgaaaagcctttcatcgaggctaccgagatttactatatcaccgaatccgatgcctttgtatctcaaaatgcggctacggattacatgaagaaggccgagacccgactcaaggaggaagaggaccgtgtcgagctttatctgcatgcctctacgcgtaccaaactcgtgcccacttgcgacaacgtgctggtacgccgtcactcggcgatgctctgggacgagtttcaagagctgctcgactcggaccaggcggacgatctgtaccgcatctacacactcctctcgcgcatccctgaaggcctcgagccgctgcgacggaaattcgaagaacacgtcaagcgtgtcggacattctgccgtcgaaaaagtgatgggtggtggcgatgttggtagcgctgatactggtgctgctactaacggcgctgcaggttcttcggctgctacagctgcggctcctgcagcgagtgattctctggacccaggcgcgtacgtgtctgcactgcttaaaacgcaccagagcaacctcaacacggtcaacgtcgcgttccgtggcgaagcaggattcctggccgcactcgacaaagcttgtcgcgactttgctaaccgcaacaaggcgactggcgcttcgacttcgaaatcgcctgagctgctcgccaagcacgcggatgcactgctgaaaaagtccaacaaggctacggccgagaactcgctcgaggaggctctggcagatgtgatggtggtgttcaagtacattgaggacaaggacgtcttccagaagttctactccaagatgcttgccaagcgtctggtcaatttcgcgtctgcatcagacgacgctgaagcgagtatgatttcgagactcaaggaggtgtgtggagtggagtacacgaaaaaacttcaaacaatgtttacggacatgggtctgagcaaggagcttaacgatcacttcaaggacacgatggcgaatcattatgataagacggagctagatgtggacttttattcgttggttctcgggaggagttcgtggccgttgcaggcgcctacgacggagttttcgattccgaccgagttgctgcccacgtacgagcgcttccagcgctactattcggtgaaacatcagggtcgaaagttgatctggctttggcaactcagtaagaacgaggtcaagacaaattacctttcgcagaagttgcagtttcagacgtccacttttcagacagccgtgttgctgcagtttaacacgaacgactcattgaccaagacgcaattgcagcaagcgactggcttgaacgatgccacaattaagccggtgctgggcatgttgtcgaaagccaaagtgttggtgacttcatcgtcggacccggaggcgtacgagttgaacgccaacttcaagtcgaagaagttgcgcgtaaatctcaacttgcccgtaaaggccgagcagaaggcagaatcaaatgatgtgctcaagacgatcgatgaggatcgaaggttgttgctgcaggcaaccattgtcagggtcatgaagagcaggaagcagttgaagcaccaggcgcttatccaggaaactgtcgcacaggtcagtggtagattcaacccgagggtctctgatatcaaaaaggctatcgatcaattgatcgataaagagtacctcgagagactcgaaggtagcaaggatacctattcctacttggcgtaa

SEQ ID NO: 13816 - protein, 806 aa, Ustilago maydis 521
MSGSGFTSSGPSATAAGGSRLPAVHDANATWAFLEPGIDLMMTRLKEGMTYPRYMELYTVAYNHFTSSSLASSSTALGRSSGPFGSKGGTALVGAELYNHLTVYFRTHLEQVRTDSDGLSEEALLRYYATEWDRYTTGANFVHRLFAYLNRYWVKREKDEGHKYVYTVYILALVQWKEHMFRYIQQKGRLVQALLKQIEKQRNGEIIEASLVKKVVDSLVSLGLDESDTNRQNLDVYRQEFEKPFIEATEIYYITESDAFVSQNAATDYMKKAETRLKEEEDRVELYLHASTRTKLVPTCDNVLVRRHSAMLWDEFQELLDSDQADDLYRIYTLLSRIPEGLEPLRRKFEEHVKRVGHSAVEKVMGGGDVGSADTGAATNGAAGSSAATAAAPAASDSLDPGAYVSALLKTHQSNLNTVNVAFRGEAGFLAALDKACRDFANRNKATGASTSKSPELLAKHADALLKKSNKATAENSLEEALADVMVVFKYIEDKDVFQKFYSKMLAKRLVNFASASDDAEASMISRLKEVCGVEYTKKLQTMFTDMGLSKELNDHFKDTMANHYDKTELDVDFYSLVLGRSSWPLQAPTTEFSIPTELLPTYERFQRYYSVKHQGRKLIWLWQLSKNEVKTNYLSQKLQFQTSTFQTAVLLQFNTNDSLTKTQLQQATGLNDATIKPVLGMLSKAKVLVTSSSDPEAYELNANFKSKKLRVNLNLPVKAEQKAESNDVLKTIDEDRRLLLQATIVRVMKSRKQLKHQALIQETVAQVSGRFNPRVSDIKKAIDQLIDKEYLERLEGSKDTYSYLA

SEQ ID NO: 13817 - DNA, 2313 bp, Strongylocentrotus purpuratus
  CDS (1)..(2313)
atgtccaatcgaccgaacaggggtcaaaaccctcatgggttgaaattgactagcttagatcagatatgggacgacttgagagcagggatccaacaggtttactccagccaagcaatgcccaagaaacgctatatggagctctactcctatgtatataactactgtacaaatgtcaatcagcttcagcaggcacggacaacatcggctaagagcaaaaagggcacagtgcaaggtggcgcacagtttgtgggccttgaactctacaaaagactacgggattttcttagggattaccttgtaagcctaagacaagatggctctgacctaatggatgagagtgtgttgacatactacacaaagcaatgggaagactatcaattctccagcaaggtattggatggcatgtgttcctacctcaaccgacactgggttagaagagagtgtgatgaggggcgtaaaggcatctatgaaatctactcccttgccctggtcacatggagagagcacttgttcaagccactcaacaaacaggttaccaatgctgttctgaaattaattgaaagggaaaggcatggagagccaatcaacacacggctggtcagtggtgtgattcaatgttatgttgaacttggtttgaatgaagatgagccaactgctaaaggtccaaccttgagtgtgtacaaggactcgtttgagagtcagttcctatctgagacagaacgcttctacacttcagagagcacagagtttctcagacagaaccctgttacagagtatatgaagaaggctgagacaagattgcttgaagagagaaggcgagtccaggtttacctacatgagagcacacacgatgatctggctaagagatgtgagagggtactcatcaagaaacatcttgacatcttctactcagaattccagaatctccttgatgctgataaaaatgatgatcttgcaagaatgtacagcttagtatcacgcatacccgatggacttggtcagctcatgacactcctggagacacacatctgtaaccaaggattggctgccattgagaagtgtggagaaacagctgttaatgatcctaagctgtatgtacagaccatccttgatgttcacaagaagtataatgccttggttctcactgcttttaacaatgactcaggctttgttgcatcgctagacaaggcctgtggaagattcatcaacagcaatgctgtcaccaagatggccaattcatcaagtaaatctccagagctcctggccaagtactgcgattcactgctcaaaaagagctccaagaatccagaggaagcagaattagaagacacactaaatcaagtgatggtagtgttcaagtacatagatgacaaagatgttttccagaagttctactccaagatgctcgctaagagacttgttcatcataattcagccagtgatgatgcagaagccagtatgatctcaaaactcaagcaagcatgtggctttgagtacacttccaaactgcagaggatgttccaggacattggtctaagcaaagacctgaatgaacagttcaagaaccacctagcaagcagtgaatctctagatattgatttcagcattcaagtcctgtgttcagggtcatggcccttccagcaaggctgtaccttcaaccttcctagcgagttggagcgaagctttcaacgattcaccaccttctatggcagccagcacagtgggaggaaacttatgtggatctttcaaatgtctaagggagagctggtcactagttgcttcaagaatagatacacattgcaggcttcaacatttcagatggctgtactcttacagttcaatgtctctgattcgtacacaatacaacagctccatgacagcacacagatcaaaatggacatactgactcaagtcattcaaattcttctcaagtgcaaactgttagttggggatgatggtgatgatgaactcaagccaacaactgaagtcaagttataccagggctacaaaaacaaaaagctgcgagtgaacattaatgtaccaatgaagacagagcagaaacaagaacaggagacaacacacaagcatattgaagaagataggaagcttcttattcaggctgcaatagttcgtataatgaagatgaggaaggctttgaggcaccaacagctcttgagtgaagtcttgacccaactctctggccgcttcaaacccaaggtgcctgtcatcaagaaatgcatcgacatcttgatagagaaggagtacttggagcgtgtagatggggagaaggacgtgtacagctacctagcatag

SEQ ID NO: 13818 - protein, 770 aa, Strongylocentrotus purpuratus
MSNRPNRGQNPHGLKLTSLDQIWDDLRAGIQQVYSSQAMPKKRYMELYSYVYNYCTNVNQLQQARTTSAKSKKGTVQGGAQFVGLELYKRLRDFLRDYLVSLRQDGSDLMDESVLTYYTKQWEDYQFSSKVLDGMCSYLNRHWVRRECDEGRKGIYEIYSLALVTWREHLFKPLNKQVTNAVLKLIERERHGEPINTRLVSGVIQCYVELGLNEDEPTAKGPTLSVYKDSFESQFLSETERFYTSESTEFLRQNPVTEYMKKAETRLLEERRRVQVYLHESTHDDLAKRCERVLIKKHLDIFYSEFQNLLDADKNDDLARMYSLVSRIPDGLGQLMTLLETHICNQGLAAIEKCGETAVNDPKLYVQTILDVHKKYNALVLTAFNNDSGFVASLDKACGRFINSNAVTKMANSSSKSPELLAKYCDSLLKKSSKNPEEAELEDTLNQVMVVFKYIDDKDVFQKFYSKMLAKRLVHHNSASDDAEASMISKLKQACGFEYTSKLQRMFQDIGLSKDLNEQFKNHLASSESLDIDFSIQVLCSGSWPFQQGCTFNLPSELERSFQRFTTFYGSQHSGRKLMWIFQMSKGELVTSCFKNRYTLQASTFQMAVLLQFNVSDSYTIQQLHDSTQIKMDILTQVIQILLKCKLLVGDDGDDELKPTTEVKLYQGYKNKKLRVNINVPMKTEQKQEQETTHKHIEEDRKLLIQAAIVRIMKMRKALRHQQLLSEVLTQLSGRFKPKVPVIKKCIDILIEKEYLERVDGEKDVYSYLA

SEQ ID NO: 13819 - DNA, 2316 bp, Tribolium castaneum
  CDS (1)..(2316)
atgtcagcgatgaagaattcctctctcagcaaaaaggaaggcaaaatgaggatccgtgcctttccaatgactatggatgagaagtatgtggagagcatatgggcccttttgaaaaacgccattcaagaaattcaaaagaaaaacaattcaggattaagttttgaagagttgtacagaaatgcgtacactatggttctccataaacatggggagaaattatacactgggctcaaggaggttgttactcatcatttagaatcaaaggtccgtgaagacgtccttcgcgccctccacaactgcttcctgatgacactgaatcaagcctggaacgaccaccagacgtcgatggtgatgattcgtgacatcctcatgtacatggatcgcgtctatgtgcaacaaaacgacgtcgacaacgtctacaatttgggattaatcatttttcgcgatcaggttgtgcgatacggttgcatacgcgaccatctccgtgaaaccctcctcgatatggtgatgcgagagcgaagaggtgaaaaagtcgacaggatctcgataaaaaacgcctgtcaaatgctaatggtcctcggtattaactcgcgcgccgtctacgaagaggacttcgaacgaccgttcctccaacaatcggccgaattttacaaagtagaaagtcagaaatttctagccgaaaatagcgcctccgtgtatataaataaagtagaagccagaatcaacgaggagtctgatagagctaaacactacttggacgaatcaaccgaatccagaatcgtcgaagtggtcgaagaggagctcattaagaagcacatgaagacgatagtcgagatggaaaattcgggcgttgtgcacatgcttaagcaccagaaaacagaggatctggcttgcatgtacaagttattcggacgtgttgccgacggtttgaagacaatggctgattgtgttagtcagtatttgagggagcaaggcaaggctttggtgcaagaagaggagcatcaaccatccaccaatgctataacattcgtccagtcgttgctagatctgaaggatcggttcgatcatttcttgaagaattcgttcaataacgataagatcttcaaacagatgatcgcctcagatttcgaacattttctcaatctcaacccgaaatcgcccgaatacctctccttatttatagatgataaattaaaaaaaggcgtcaaagggatgtccgaacaagaaattgaattggttcttgacaagtccatggtactctttaggttccttcaagagaaagacgttttcgaacgctattacaaacaacacttggccaagcgattacttttgaataagtcggttagcgacgattgggagaaaaatatgatttcaaagttaaagactgagtgcggttgtcagttcacgtcaaaacttgaaggcatgttcaaagatatgacagtttcaaacacgatcatggacgagtttaaggatcatatcaccaaaactgagtcaagcttatgcggggtggaccttttcatgcgcgtcttaacgaccgggttctggcctacgcagagcgccactcccaagtgccacattcctgctgttccactagctgccttcgaatgttttagtagattttatttagccaaacatagcggaaggcagttgacgttacaaccccagttgggcaacgccgatctcaatgccatatttttcggtccgaaaaaggaagaccccgacaaagacggggcgtgttcgtcgaccagctccatttcgccgcggacaggccccagaaagcacataatccaagtgtccacctaccaaatggtcgttttaatgctgttcaacaaccatgagaaattaacctatgaggagattttaaacgagtcggatattcccgagagagatttaattagggcgctgcagtcgttggcgatgggcaaagcgacgcagcgcatcttgattaagaatccgcggactaaagaaatcgaatcgaaccacgagttttacgtcaacgattcgttcacgtcgaagttgcatcgcgtgaagatccagacggtggcggcgaagggcgaaagcgagcccgagaggcgcgaaacgaggaacaaagtggacgaggacaggaagcacgagatcgaagcagctatcgttagaataatgaagtcgaggaaacggatgccgcataacattctggtgacggaagtgaccgagcagctgaagagccgatttttaccatcgccagtgattatcaagaaacgaatagaagggctgattgagcgggagtatctggcacggacgcccgaggacaggaaggtctacacctacgttgcttga

SEQ ID NO: 13820 - protein, 771 aa, Tribolium castaneum
MSAMKNSSLSKKEGKMRIRAFPMTMDEKYVESIWALLKNAIQEIQKKNNSGLSFEELYRNAYTMVLHKHGEKLYTGLKEVVTHHLESKVREDVLRALHNCFLMTLNQAWNDHQTSMVMIRDILMYMDRVYVQQNDVDNVYNLGLIIFRDQVVRYGCIRDHLRETLLDMVMRERRGEKVDRISIKNACQMLMVLGINSRAVYEEDFERPFLQQSAEFYKVESQKFLAENSASVYINKVEARINEESDRAKHYLDESTESRIVEVVEEELIKKHMKTIVEMENSGVVHMLKHQKTEDLACMYKLFGRVADGLKTMADCVSQYLREQGKALVQEEEHQPSTNAITFVQSLLDLKDRFDHFLKNSFNNDKIFKQMIASDFEHFLNLNPKSPEYLSLFIDDKLKKGVKGMSEQEIELVLDKSMVLFRFLQEKDVFERYYKQHLAKRLLLNKSVSDDWEKNMISKLKTECGCQFTSKLEGMFKDMTVSNTIMDEFKDHITKTESSLCGVDLFMRVLTTGFWPTQSATPKCHIPAVPLAAFECFSRFYLAKHSGRQLTLQPQLGNADLNAIFFGPKKEDPDKDGACSSTSSISPRTGPRKHIIQVSTYQMVVLMLFNNHEKLTYEEILNESDIPERDLIRALQSLAMGKATQRILIKNPRTKEIESNHEFYVNDSFTSKLHRVKIQTVAAKGESEPERRETRNKVDEDRKHEIEAAIVRIMKSRKRMPHNILVTEVTEQLKSRFLPSPVIIKKRIEGLIEREYLARTPEDRKVYTYVA

SEQ ID NO: 13821 - DNA, 2322 bp, Tribolium castaneum
  CDS (1)..(2322)
atgtcgaataaaaattccgtcaataacacagcggggctcaaacagatcgacctggatcagatttggggggatttgcacgcggggatcgagcatgcatacagccagcagcacatgcccaagtacctctacatccagctgtacacccatgtttatgactactgcacctcggtgcaccagcaggccaatggcaggggctcctccagcatctccaccaagaacaagaagagccaggttgggggcggcgcccagctcgtgggcctcgagctctacaagaggatcagggagttcctgaggaactatctggtgactctgctgagtgacgggatgaatcggatgggtgaaggcgttttgaaattttatacgcgtcaatgggaggagtatcagttcagtagcaaggttctgaatggtatttgctcgtatttgaatcgacattgggtgaagagagaatgcgaagagggaaggaaaggaatctacgaaatttatcagctcgcactggtgacatggcgagatcatctgttcaaacaattaaacaaacaggtaacaactgccgttctgaaactgatcgaacgcgagcgcaacggcgaaacaatcaacactcgtttagtctctggcgtgataaactgttacgtggaattgggcctaaacgaggaggaaccaggggccaaaggaccgaacctatcggtgtacaaagagagtttcgaaaacatgtttctggaagacactgaacgcttctacctaaaagagagtaacaacttcctagcacaaaatccggtcactgaatacatgaaaaaggccgaacaacgtctcctcgaagaacagaaacgcgtccaagtctatctacacgaaacaacaagcggccgtttagccaaaacctgcgaaagagtcctcattaaaaagcacctcgacatgttccattcggagttccagcagttgttggacgccgacaaagacgaggatttgggtcggatgtactcgttggtagcgcggattccggacggtttaggggaattacggacgcttctcgagcaacatatcgcagctcaggggctctcagcgattgaaaaatgcggagaaagcgcccataatgacccgaaaatttacgtcaacacgattctggaggtgcacaagaagtacaacgctcttgttttggtggcgttcaacaacgatagcggttttgtggcggctttggacaaggcatgtggtcgtttcatcaacgccaatgccgttaccaaaaaagccaattcgagcagcaaatcgccggaattgctcgcgaaatactgtgatttgctgctgaagaagtcgagcaagaatccggaggaggcggagctcgaagatacgttaaaccaagtcatggttgtgttcaaatatatcgaagataaggacgtttttcaaaagttctacagtaaaatgctggccaagcgattggtccagcacatgtcggcgagtgacgatgctgaagcttcaatgatctcaaaactgaaacaggcatgcgggtttgagtacacctccaagttgcaaaggatgttccaggacattggcgtgtctaaagatctgaacgagcaattcaaaagtcatctattaaaatcaaacgaaaccctagacatagattttagtattcaagtgttatcttccggatcatggcctttccagcaatctttcaccttcggattgccgaccgagcttgaaagaagtgttcatagatttacaaatttctattccggtcagcattcgggccggaaattaaattggctgtataacatgtcgaaaggagagttacacacgaactgttttaaaaatagatacacactccaagctagtacgtttcaaatggctgtgctgctccagttcaacgtgtctgaaagttggacaatagctcaactcgaggagaatacacaaatcaaaacagatttcctaatacaggtcatacagatattacttaaagcgaagctgatcacttgcgatgatgacgagaacgagctcgcgccacactcggttgtgaaccttttcctaggatataaaaataaaaaacttcgggtcaatatcaatattccgatgaagaccgagctaaagatggagcaagaaacaactcacaagcatattgaagaggacaggaagttgctgattcaagccgcgattgtacgaatcatgaaaatgaggaaaatactgaaacatcaacagttggtggctgaagttttgaaccagttgtcgtcaaggttcaagccgagggttcacatcatcaagaaatgcatagatattctgatcgagaaggagtatctggagaggactgagggtcagaaggacacctacagctacttggcatga

SEQ ID NO: 13822 - protein, 773 aa, Tribolium castaneum
MSNKNSVNNTAGLKQIDLDQIWGDLHAGIEHAYSQQHMPKYLYIQLYTHVYDYCTSVHQQANGRGSSSISTKNKKSQVGGGAQLVGLELYKRIREFLRNYLVTLLSDGMNRMGEGVLKFYTRQWEEYQFSSKVLNGICSYLNRHWVKRECEEGRKGIYEIYQLALVTWRDHLFKQLNKQVTTAVLKLIERERNGETINTRLVSGVINCYVELGLNEEEPGAKGPNLSVYKESFENMFLEDTERFYLKESNNFLAQNPVTEYMKKAEQRLLEEQKRVQVYLHETTSGRLAKTCERVLIKKHLDMFHSEFQQLLDADKDEDLGRMYSLVARIPDGLGELRTLLEQHIAAQGLSAIEKCGESAHNDPKIYVNTILEVHKKYNALVLVAFNNDSGFVAALDKACGRFINANAVTKKANSSSKSPELLAKYCDLLLKKSSKNPEEAELEDTLNQVMVVFKYIEDKDVFQKFYSKMLAKRLVQHMSASDDAEASMISKLKQACGFEYTSKLQRMFQDIGVSKDLNEQFKSHLLKSNETLDIDFSIQVLSSGSWPFQQSFTFGLPTELERSVHRFTNFYSGQHSGRKLNWLYNMSKGELHTNCFKNRYTLQASTFQMAVLLQFNVSESWTIAQLEENTQIKTDFLIQVIQILLKAKLITCDDDENELAPHSVVNLFLGYKNKKLRVNINIPMKTELKMEQETTHKHIEEDRKLLIQAAIVRIMKMRKILKHQQLVAEVLNQLSSRFKPRVHIIKKCIDILIEKEYLERTEGQKDTYSYLA

SEQ ID NO: 13823 - DNA, 2229 bp, Petunia integrifolia subsp. inflata
  CDS (1)..(2229)
atgaaccagcgcagcacaattgatttggatcagggatgggaattcatgcaaaggggcattacaaagctgaagaacattctagaagggctgcctgagccacagttcagctcagaggactatatgatgttgtatacgaccatatataacatgtgtactcagaagccaccacatgattactctcaacaactgtatgacaaatatcgtgaagcttttgaagaatatatcacagcaacggtattgccttctttgagagaaaaacatgatgagttcatgttgcgagagctagtaaaaaggtggtcaaaccataagattatggtcagatggttgtcacgattcttccattatcttgaccgctatttcattgcccggagatctctgccagggcttaatgaagtcggactaacatgcttccgtgatcaggtctaccaagagttgaatggcaaagtcagggatgctgttatatcattgattgatcaagagcgcgagggagagcaaattgacagggctctactgaagaatgtgctagatatatttgttgaaattggaatggggcaaatggatcagtatgagaatgactttgaagcttcaatgctcaaggacacagctgcttattattctcgcaaagcttctaactggatcctagaagattcctgtccagattatatgctgaaagccgaggagtgcttgaaacgggagaaggatagggttgctcattatctccattcaagcagtgagacaaagttgcttgagaaagtacaacatgagttgttatctgtgtatgccactcaactgcttgagaaggaacactctgggtgccatgcattactaagagatgataaggttgaagatttatcaaggatgtataggctcttttccaagattcttcgaggcttagaccctgtggctaatatatttaaacagcatgttactgccgaaggtacagcattggtgaaacaggctgaagatgctgcaagcaacaaaaaggcagagaagagagatgtggttggtttgcaggagcaggtttttgtacggaaagtcattgagcttcatgataaatacttggcatatgtgaataactgtttccagaaccacacactttttcacaaggcacttaaagaggcttttgaagttttttgcaataaaggcgttgctggtagctcaagcgctgaacttcttgccacattctgcgacaacattctcaaaaaaggtggaagtgagaagttgagtgatgaagccattgaagacacgctggaaaaggttgttaagctcttagcatatattagtgataaggacttgtttgcagaattttatagaaaaaagcttgccggcggttgttatttgataaagagtgccaatgatgaacatgagagaagcatcctaacaaaattgaagcagcaatgtggaggccagttcacctccaagatggagggaatggtcactgatttgactttggcaagggaaaatcaagccagctttgaggagtatttgagcaacaatccagcggcaaatccaggaatcgacctgacagtgactgtcttgactactggcttctggcctagctacaagtcttttgatctccaacctcccacagagatggttagatgtgttgaagtatttaaggagttctatcaaacaaaaacgaagcacaggaaactcacgtggatatactctttgggcacttgcaacataaacggaaaatttgatccaaaaactattgagctcgttgtcactacttatcaggcttctgctctgttgctatttaacgcatcagataggttgagttatcaggaaattatggcacaattgaacctgtcagatgatgatgttgttcggcttcttcattctctttcatgtgcaaagtataagattctcaacaaggagccaagcaccaagacaatttctcagactgatgtctttgagttcaactcaaagttcactgacaaaatgaggaggatcaagatacctcttcctcctgtggatgagaagaaaaaggtaattgaagatgttgacaaggacagacggtatgctatagatgcttcaattgttcgtattatgaagagtcgtaaagtattgggctaccaggaactagtcatggagtgcgttgaacagttgggacgcatgttcaagcctgatgtcaaagctatcaagaagagaattgaagatttgataactagagattacttagagagagacaaagataacccaaacttgttcaagtacttggcatga

SEQ ID NO: 13824 - protein, 742 aa, Petunia integrifolia subsp. inflata
MNQRSTIDLDQGWEFMQRGITKLKNILEGLPEPQFSSEDYMMLYTTIYNMCTQKPPHDYSQQLYDKYREAFEEYITATVLPSLREKHDEFMLRELVKRWSNHKIMVRWLSRFFHYLDRYFIARRSLPGLNEVGLTCFRDQVYQELNGKVRDAVISLIDQEREGEQIDRALLKNVLDIFVEIGMGQMDQYENDFEASMLKDTAAYYSRKASNWILEDSCPDYMLKAEECLKREKDRVAHYLHSSSETKLLEKVQHELLSVYATQLLEKEHSGCHALLRDDKVEDLSRMYRLFSKILRGLDPVANIFKQHVTAEGTALVKQAEDAASNKKAEKRDVVGLQEQVFVRKVIELHDKYLAYVNNCFQNHTLFHKALKEAFEVFCNKGVAGSSSAELLATFCDNILKKGGSEKLSDEAIEDTLEKVVKLLAYISDKDLFAEFYRKKLAGGCYLIKSANDEHERSILTKLKQQCGGQFTSKMEGMVTDLTLARENQASFEEYLSNNPAANPGIDLTVTVLTTGFWPSYKSFDLQPPTEMVRCVEVFKEFYQTKTKHRKLTWIYSLGTCNINGKFDPKTIELVVTTYQASALLLFNASDRLSYQEIMAQLNLSDDDVVRLLHSLSCAKYKILNKEPSTKTISQTDVFEFNSKFTDKMRRIKIPLPPVDEKKKVIEDVDKDRRYAIDASIVRIMKSRKVLGYQELVMECVEQLGRMFKPDVKAIKKRIEDLITRDYLERDKDNPNLFKYLA

SEQ ID NO: 13825 - DNA, 2223 bp, Petunia integrifolia subsp. inflata
  CDS (1)..(2223)
atgacgatcaaacaaatgaataatattgagctgcaggatggatgggcattcatgcagaaaggagtcacaaaattgaagaaaatcttagaagggagttcagagtcattcagctctgaagagtacatgatgctctacaccactatctatgacatgtgtactcagaagccccctcatgatcactctcagcagctatatgacaaatacaagggagcttttgaagaatacatcaattctacagttctgtcttccatcagagagaagcacgatgagtttatgctgagggagtttgtgaaaagatggttaaatcataaaattatggttaggtggctttcacggttcttcaattatcttgaccggtattttatcgctcgaaggacactccctgctcttaaggaagttggtctgatgtgtttccgtgatctggtttatcaggagttgaaggttaaaggtagagatgcagttatagcactgattgatctagaacgtgagggtgagcagattgatagagctttattgaaaaatgtgctagatatattcgttgaaattggtatgggtcagatggattactatgaaaatgattttgaggatgccatgcttaaagatactgcagctttttattctcgaaaagcttcaaactggattatggaagattcctgtccagattatatgctaaaagcagaggagtgcttgaaaaaagagaaagatagggtgtctcattatttacactctagtagcgaggaaaaacttctggagaaagtgcaaaatgaattattggttgtacataccaatcaattgcttgagaaggagaattctggatgccgagttttgcttagagatgataaggtggtggatttatctcgaatgtatagattattccacagaatccctaaagggctggagcctgttgcaaagatgtttaagcagcatgtcactgctgaaggcatggtcttggtgcaacaagctgaagactcagcaagtaacaaggccggaatttccagtggttcacaggagcaggtctttattaggaaggttattgagctgcatgacaagtatatggcttatgtgatcgactgtttcgcaaataactccctctttcacaaggctttgaaagaggcatttgaggtcttctgtaacaaaactgttgctggctcgtctagtgcagagctcctcgcttcttattgtgataacatccttaagaagggtgggagtgaaaaactcagcgatgatgccattgaggaaacattggataaggtggttaagcttctagcatacatcagcgacaaagacctgtttgctgagttctacaggaagaagctttctcggcgattgctctttgataaaagtggcaacgatgaccatgaaaggctgatcttaacaaagttaaagcagcagtgcggtggacagttcacgtcaaagatggagggaatggtgacagacttgacgttggccaaggaaaatcagaatcactttcaggaatatctcagcaacaacccagcagctagtcctggaattgatttgactgtcacagttcttacaactgggttttggcctagttataaatcttctgatctgaggctcccaatggaaatggtgaagtgtgtagaagtcttcaaggaattttatcagacaaagacaaaacacaggaaattgacgtggatttattcattgggtacatgtcacatcaatggcaagtttgaacctaaaactatcgaactggttctgggaacttatcaggctgctgttctattactgtttaatgcttcagatagattgagttactcagatatcaaaagtcagttaaatttggcagatgatgacttggtccgattgcttcaatccctgtcatgtgccaagtataaaattctgactaaagatcctagcaatagaactgtttcgtcaactgatcattttgagttcaactccaagttcactgacaaaatgaggaggattagggtccctttgcctcctgtagatgaaaggaaaaaagtggttgaggatgttgacaaggacagaagatatgcaatggatgcctgtattgtgcgcataatgaagagtcgtaaggtgcttcctcatcagcagctcgtgttggagtgtgttgagcaattgagccgcttgtttaagcctgatttcaaagaaatcaaaaagcggattgaagatcttatcactagggaatacttggaaagagaccaagagaaccccaacgtattcaagtacttggcctga

SEQ ID NO: 13826 - protein, 740 aa, Petunia integrifolia subsp. inflata
MTIKQMNNIELQDGWAFMQKGVTKLKKILEGSSESFSSEEYMMLYTTIYDMCTQKPPHDHSQQLYDKYKGAFEEYINSTVLSSIREKHDEFMLREFVKRWLNHKIMVRWLSRFFNYLDRYFIARRTLPALKEVGLMCFRDLVYQELKVKGRDAVIALIDLEREGEQIDRALLKNVLDIFVEIGMGQMDYYENDFEDAMLKDTAAFYSRKASNWIMEDSCPDYMLKAEECLKKEKDRVSHYLHSSSEEKLLEKVQNELLVVHTNQLLEKENSGCRVLLRDDKVVDLSRMYRLFHRIPKGLEPVAKMFKQHVTAEGMVLVQQAEDSASNKAGISSGSQEQVFIRKVIELHDKYMAYVIDCFANNSLFHKALKEAFEVFCNKTVAGSSSAELLASYCDNILKKGGSEKLSDDAIEETLDKVVKLLAYISDKDLFAEFYRKKLSRRLLFDKSGNDDHERLILTKLKQQCGGQFTSKMEGMVTDLTLAKENQNHFQEYLSNNPAASPGIDLTVTVLTTGFWPSYKSSDLRLPMEMVKCVEVFKEFYQTKTKHRKLTWIYSLGTCHINGKFEPKTIELVLGTYQAAVLLLFNASDRLSYSDIKSQLNLADDDLVRLLQSLSCAKYKILTKDPSNRTVSSTDHFEFNSKFTDKMRRIRVPLPPVDERKKVVEDVDKDRRYAMDACIVRIMKSRKVLPHQQLVLECVEQLSRLFKPDFKEIKKRIEDLITREYLERDQENPNVFKYLA

SEQ ID NO: 13827 - DNA, 2148 bp, Oryza sativa subsp. indica
  CDS (1)..(2148)
atgaatatgtcgccgcgcattccggtggtggacctcgaggacgggtggcgcgacgtgctcgccggcgtcgccaagctcaagtgcatcctcgatggctccaacgtcgtgcacttcgtccccgacgagtacatgcacctctacacgacggtttacaacatgtgcacgcagaagccgccgaacgactactcgcaggtgctctacgatcgctacaagcaggccctggacgatcacatcgaatccgtcgtgttgccctccttgaatgagaagcatggcgtgttccttctgagggaaatagtgcagaggtgggagaaacacaagctaatggtaaggtggctgaggaggttctttgactacctcgatcgttactatgttacacggaggtcccttgattcactcaaagatctgggctggagtagcttccgggatttggttttcgataagctcaaaagtactgtggcaacaattatgattggcatgggaaggcaatctaatagaccgtccactcctgaagaatgccctgatatctatgttgaaattggggatagtcaactgaattattacagtgatgattttgaacaatcatttctcaacggaacaacagattactattctaagaaggcacaaacatggattcttgagaattcttgccctgaatacatgctcaaggctgcactcttcgagttgatagataggcgtgcagaagaaattctgaacaaggagaactccggatgcaaagtgttgctttgtgatgaaaagaccgaggatctagcaaggatgtttaggctcttctctaggataactgacgggctgcttccagtatcgaaaatatttaaggagcatgtcattgctgagggtatgtctctgctgaaacatgcaacagatgctgccaacagcagaaaggatgagaagaagggggtggtggtgggattgccggagcaggattttgtgaggagtgtcatagagctccatgacaaatatatggcatatgtcaccaactgtttccagagcaactcagtatttcacaaggcacttaaggaggcctttgaagttttttgcaacaaagatgttgttggttgcagtagtgctgaactgtttgcggcatactgtgatagtatcttaaaaagaggtggaagtgaaaagctaagtgatgaagctatagatgaaagtcttgagaaggttgtcaagcttctaacatatctcagcgacaaggacctctttgtagagtttcataggaagaaacttggaaggagattgctgtttgataagaatacaaatgacgaacatgagagaatcctactctccaagctgaagcaattcttcgggggacagtttacatcaaaaatggaggggatgctcaaagatattacattggcaaaagaacatcagtcaagttttgaggagtacgtaagcaacaatccagagtcaaatcctctgatagacttgaatgtgactgtcttgacaacaggatactggccaacatacaagaactcagatataaatcttccattggagatggttaaatgcgtggaggttttcaaggaatattatcggtccgacaagcaacacagaaagcttacctggatcttttccttgggaaactgcgtcgtcattggaaattttgatgctaaacctgttgagttcgttctcaacacttatcaggctgcattgttgctgctattcaatgaagctgataaactgagttactctgatattgtgtcacaattaaaactgtctgatgatgatgccgtgcgtttgcttcattcgctttcttgtgcaaagtataagattctcaacaaagagcctagcaacagagtgatttctccagaggacgagtttgagttcaattccaaatttaccgataggatgcgaaggattaaggtaccacttcctcaaatcgatgagaagaaaaaggttgtcgatgatgtcaacaaggacaggaggttcgcaattgatgcatctcttgtgcgcatcatgaaaagccgcaaagttctgggccatcagcaacttgtagcggaatgcgtggagcagctcagccgcatgtttaagcctgacatcaggatcatcaagaggaggatcgaggatcttatcagcagggagtacttggagcgtgattcggagaatgcccagacctacaaatacttggcttga

SEQ ID NO: 13828 - protein, 715 aa, Oryza sativa subsp. indica
MNMSPRIPVVDLEDGWRDVLAGVAKLKCILDGSNVVHFVPDEYMHLYTTVYNMCTQKPPNDYSQVLYDRYKQALDDHIESVVLPSLNEKHGVFLLREIVQRWEKHKLMVRWLRRFFDYLDRYYVTRRSLDSLKDLGWSSFRDLVFDKLKSTVATIMIGMGRQSNRPSTPEECPDIYVEIGDSQLNYYSDDFEQSFLNGTTDYYSKKAQTWILENSCPEYMLKAALFELIDRRAEEILNKENSGCKVLLCDEKTEDLARMFRLFSRITDGLLPVSKIFKEHVIAEGMSLLKHATDAANSRKDEKKGVVVGLPEQDFVRSVIELHDKYMAYVTNCFQSNSVFHKALKEAFEVFCNKDVVGCSSAELFAAYCDSILKRGGSEKLSDEAIDESLEKVVKLLTYLSDKDLFVEFHRKKLGRRLLFDKNTNDEHERILLSKLKQFFGGQFTSKMEGMLKDITLAKEHQSSFEEYVSNNPESNPLIDLNVTVLTTGYWPTYKNSDINLPLEMVKCVEVFKEYYRSDKQHRKLTWIFSLGNCVVIGNFDAKPVEFVLNTYQAALLLLFNEADKLSYSDIVSQLKLSDDDAVRLLHSLSCAKYKILNKEPSNRVISPEDEFEFNSKFTDRMRRIKVPLPQIDEKKKVVDDVNKDRRFAIDASLVRIMKSRKVLGHQQLVAECVEQLSRMFKPDIRIIKRRIEDLISREYLERDSENAQTYKYLA

SEQ ID NO: 13829 - DNA, 2421 bp, Vitis vinifera
  CDS (1)..(2421)
  misc_feature (774)..(774): y is t or c
  misc_feature (1662)..(1662): r is g or a
  misc_feature (2235)..(2235): y is t or c
atgaaaaaagccaagtcccaggccgtggcttgctctctcgaccccaagaacggcctccagccaccaccccacccacctcctccctcttcccaccacttccctgacgacgacttcgacccctccgccatggcccttgacgatgatctcaagcccgacgatgccgacgccgcggcctgtagccgaccttcagctggtggtgtcaccgccaatttgtcccgtaaaaaggccacgcctcctcagcccgccaagaagcagcttgttatcaagctcctcaaagctaaaccaaccttacccacaaattttgaagaggatacatgggcaaagcttaagtcagctattagtgctatattcttgaagcaacctgatccctgtgacttggagaagctttatcaggctgttaatgatctctgcctccacaagatgggtggaaatctctatcaacggattgaaaaggagtgtgaatcacatatacgtgcagcattacaatctttggttggccaaagcccagacctggtggttttcctatcacttgttgagaaatgctggcaggacctttgcgatcagatgttgatgattcgtggtatagccttgtatcttgatagaacatatgtaaaacagactccaaatgtgcgttcgctctgggatatgggtttgcagcttttccgcaaacatctttctttatctccagaagttgagcacaaaactgtaactggtctcttgagaatgattgagagggaaagattaggtgaagcagtagataggactctccttaaycatcttttgaagatgtttactgctctaggaatttatttggaaagttttgagaagccattcctcgagtgtacgtctgaattttatgctgctgaaggcatgaaatacatgcagcaatcagatgttccggattacttgaaacatgtggagataaggttgcatgaagaacatgaaagatgcttactgtatctggatgcaagcacaagaaagcccctggtagcaactgcagaaagacaactccttgaacgccacatatctgcaattctagataagggtttcatgatgctgatggatggaaatcgaattgaggacctccagaggatgtatttactattttcaagggttaatgccctcgaatcactaagacaggcccttagctcttacatccgaagaaccgggcaaggaattgttatggatgaggaaaaagataaagatatggtttcctgcctgctggaatttaaggcttctcttgatacaatatgggaagaaagcttttcaaggaatgaagcattttgcaacaccataaaagatgcatttgaacatctcattaatctccgtcagaaccgacctgctgagcttattgcaaagtttctggatgagaaacttcgtgctgggaacaagggtacatctgaagaggagttggagggtacacttgataaagttttggttttattcaggtttatccagggtaaggatgtgttcgaagcattttacaagaaggatctggcaaaaaggctactgttggggaagagtgcatcaattgatgcagagaagtcaatgatcactaagttgaagactgaatgcggaagtcagtttactaacaaacttgaaggaatgtttaaggacattgaattatctaaagagataaatgagtccttcaaacaatcatcrcaagccaggacaaaacttccaacaggaattgagatgagtgttcatgtcttaacaactggatattggcctacttacccacctatggatgttcggctcccgcatgaattgaatgtatatcaggacattttcaaggagttctacttgagcaaatacagtgggaggcgattaatgtggcaaaactcattaggacactgtgttttgaaagcagagtttccaaaaggtaaaaaggagctggcagtttctctatttcagactgttgtcttgatgctgtttaatgatgcgcaaaagcttagctttcaagatattaaggactctactggcattgaggataaggagttgagaaggactctgcagtcccttgcatgtggaaaagttcgtgtccttcaaaaggtgaggggttatggcaggaattggagggaagttgaggatgatgactcatttatgttcaatgaagggtttactgctcctctctaccgtataaaagtaaatgcaatccaaatgaaggaaacagtggaggagaacacaagcaccactgaaagagtgttccaggatcgtcaatatcaggttgatgcygctattgtccggataatgaagacgaggaaagttcttagtcacacactattgattactgaactctttcagcagctaaaatttccaataaagccagctgatttgaagaaaaggattgaaagcctcatcgacagggagtacctagagcgggacaaaaacaacccccagatatacaattacttggcataa

SEQ ID NO: 13830 - protein, 806 aa, Vitis vinifera
MKKAKSQAVACSLDPKNGLQPPPHPPPPSSHHFPDDDFDPSAMALDDDLKPDDADAAACSRPSAGGVTANLSRKKATPPQPAKKQLVIKLLKAKPTLPTNFEEDTWAKLKSAISAIFLKQPDPCDLEKLYQAVNDLCLHKMGGNLYQRIEKECESHIRAALQSLVGQSPDLVVFLSLVEKCWQDLCDQMLMIRGIALYLDRTYVKQTPNVRSLWDMGLQLFRKHLSLSPEVEHKTVTGLLRMIERERLGEAVDRTLLNHLLKMFTALGIYLESFEKPFLECTSEFYAAEGMKYMQQSDVPDYLKHVEIRLHEEHERCLLYLDASTRKPLVATAERQLLERHISAILDKGFMMLMDGNRIEDLQRMYLLFSRVNALESLRQALSSYIRRTGQGIVMDEEKDKDMVSCLLEFKASLDTIWEESFSRNEAFCNTIKDAFEHLINLRQNRPAELIAKFLDEKLRAGNKGTSEEELEGTLDKVLVLFRFIQGKDVFEAFYKKDLAKRLLLGKSASIDAEKSMITKLKTECGSQFTNKLEGMFKDIELSKEINESFKQSSQARTKLPTGIEMSVHVLTTGYWPTYPPMDVRLPHELNVYQDIFKEFYLSKYSGRRLMWQNSLGHCVLKAEFPKGKKELAVSLFQTVVLMLFNDAQKLSFQDIKDSTGIEDKELRRTLQSLACGKVRVLQKVRGYGRNWREVEDDDSFMFNEGFTAPLYRIKVNAIQMKETVEENTSTTERVFQDRQYQVDAAIVRIMKTRKVLSHTLLITELFQQLKFPIKPADLKKRIESLIDREYLERDKNNPQIYNYLA

SEQ ID NO: 13831 - DNA, 2157 bp, Vitis vinifera
  CDS (1)..(2157)
  misc_feature (202)..(202): y is t or c
  misc_feature (687)..(687): r is g or a
  misc_feature (1477)..(1477): r is g or a
  misc_feature (2046)..(2046): s is g or c
atgggcagtcagaagaagaggaattttcaaatagaggcgttcaagcatcgggtggtggtggatcccaagtacgccgacaagacttggaagatattggagcatgcaatccatgagatatataatcacaacgctagtggtcttagttttgaagagctttataggaatgcttacaatatggtactgcacaaatttggtgagaagytgtactcagggctggtttcaactatgacttcacatctcaaagacatatcaaagtttatagaggctgctcagggaggtttgtttctggaggagctgaatagaaagtgggcagatcataacaaggcattgcaaatgatacgagacatactaatgtacatggacaggactttcataccaagtactcataaaacccctgttcatgagcttgggctgaatctgtggagggacaacattatccactccagcaaaatccaaacaaggctactaaatacactccttgaactagtactcagagaacgtaatggtgaagtcataaaccgtggactgatgaggaatataattaaaatgctaatggatttgggttcttctgtctatcaggaagactttgaaaagcctttccttgaggtttcagctgatttctacagggttgagtctcagaagtttattgagtgctgtgattgtgcagactacctgaagaaagctgaragacggctaaacgaagaaatggaaagggtatcccagtacttggatgccaagagtgaagtcaagatcactaatgtggtggagaaggagatgattgcaaaccacatgctgaggctagttcatatggagaactcaggtttggtaaacatgcttcttgatgataaatatgatgacctaggaagaatgtacaacttgttccgccgggttccaaatggcctttcaacaatacgagaggtgatgacctctcatatcagggacactggtaagcatcttgttactgatcctgaaaggttgagggatcctgtagaatttgctcatcatttaacaaatgacaaaacattccagaatgctttgacttcctcttttgaatacttcattaatttgaaccctcgttctcctgagttcatttcattatttgtggatgacaaactccgcaaaggcctgaagggggttagtgaggaggatgtggagattatccttgataaggtgatgatgctgttccgctacttgcaggagaaagacgtatttgagaagtattataaacagcatttggcaaaacgactcctgtctggaaaaactgtttctgatgatgcagagagaagtctgatagttaagctcaagacagagtgtgggtaccaatttacttgcaaattagaaggcatgtttaccgacatgaaaacctctcaggataccatgcaaggatttaattcagcccatggtgctgacttaggggatggccctacgctggctgtcaccgttttgacaacagggtcttggcctactcagcccagcrtcacctgcaacctgcctactgaaatgttggctctctgtgagaagttccggtcatattaccttgggacccatactggtcggagattgacctggcaaactaacatgggaacagctgatataaaagcaacttttgctaagggccagaagcatgagctacacgtgtccacttaccaaatgtgtgttcttatgctgtttaacaatgctgatcggctaagctacaaggagattgagcaggcaacagagatccctgcttcagatttgaagaggtgcatgcaatccatggcttgtgtaaaaggtaaaaatgttcttcggaaagagcccatgagcaaagatattggtgaagatgatgtatttttcgttaatgacaaattcactaataaactctataaggtgaagataggaactgtagttgcacaaaaggaaacagagcctgaaaaacaggaaaccaggcaaagagtagaggaggataggaagccacagattgaggctgccatagtgaggatcatgaaatcgaggagggtactggatcataacaatcttattgctgaggtgacaaagcagttgcagtcscggttcctggccaatcctgtagaaattaaaaaacggatcgagtcccttattgaacgtgatttcttggagagagacaatgtggataggaagttgtaccgataccttgcctga

SEQ ID NO: 13832 - protein, 718 aa, Vitis vinifera
  misc_feature (493)..(493): The Xaa at location 493 stands for Ile, or Val.
MGSQKKRNFQIEAFKHRVVVDPKYADKTWKILEHAIHEIYNHNASGLSFEELYRNAYNMVLHKFGEKLYSGLVSTMTSHLKDISKFIEAAQGGLFLEELNRKWADHNKALQMIRDILMYMDRTFIPSTHKTPVHELGLNLWRDNIIHSSKIQTRLLNTLLELVLRERNGEVINRGLMRNIIKMLMDLGSSVYQEDFEKPFLEVSADFYRVESQKFIECCDCADYLKKAERRLNEEMERVSQYLDAKSEVKITNVVEKEMIANHMLRLVHMENSGLVNMLLDDKYDDLGRMYNLFRRVPNGLSTIREVMTSHIRDTGKHLVTDPERLRDPVEFAHHLTNDKTFQNALTSSFEYFINLNPRSPEFISLFVDDKLRKGLKGVSEEDVEIILDKVMMLFRYLQEKDVFEKYYKQHLAKRLLSGKTVSDDAERSLIVKLKTECGYQFTCKLEGMFTDMKTSQDTMQGFNSAHGADLGDGPTLAVTVLTTGSWPTQPSXTCNLPTEMLALCEKFRSYYLGTHTGRRLTWQTNMGTADIKATFAKGQKHELHVSTYQMCVLMLFNNADRLSYKEIEQATEIPASDLKRCMQSMACVKGKNVLRKEPMSKDIGEDDVFFVNDKFTNKLYKVKIGTVVAQKETEPEKQETRQRVEEDRKPQIEAAIVRIMKSRRVLDHNNLIAEVTKQLQSRFLANPVEIKKRIESLIERDFLERDNVDRKLYRYLA

SEQ ID NO: 13833 - DNA, 2358 bp, Solanum lycopersicum
  CDS (1)..(2358)
atgaagaaagctaagtcacaagctctaccttgttctattgatagcaaaaacggtcagcacgttcacttttcctccgatatcgacgacccttctggaaactcccccatgatggaggattgcaacatcgattcctcttcagttgctggtggggttacggccaatttgtctcgcaagaaagctacccctcctcagcctgctaagaaactcgtaattaagctccttaaagcgaaacctacgttgccgacaaactttgaggaaaatacttgggcaactctaaagtcagctattagtgcgatattcttgaagcagcctgatccatgtgatttagaaaagctttatcaggctgtaaatgacctttgtctgcacaaaatgggaggaaatctatatcaacgaattgaaaaagagtgtgaatcacacatagctgcagctctacgttctttagttggccaaaatgaagatcttgtagttttcttgtcgcttgttgagaggtgttggcaggatttttgtgatcagatgttgatgattcgtggaatagctttgtatcttgatagaacatatgtgaaacaaaccccaaatgtgcgttcactgtgggatatgggcttgcagcttttccgcaagcatctctctcttgcctcagaagtagaacacaaaactgtttttggcctcctacagatgattgagaccgaaagattaggtgaggcagttgatcgaactctgcttaaccatcttttgaagatgttcactgccttggggatttatgctgaaagttttgaaaagccatttcttgagcgtacttctgagttttatgctgctgaaggtgtcaaatacatgcagcagtcagatgttccagattacctgaagcatgtggaggtaaggttacatgaagaacatgacaggtgcttactctacctggatgcaagtactagaaaaccactgatagcaactgcagagaggcaacttttagaacaacacatttctgcaattcttgataagggtttcacagtgttgatggatggtaatcgtattgaagatctccaaaggatgtatatgctattttgcagggtcaatgatctcgaatctttaaggcaagcacttagctcatatatccgaagaactggtcagagcattgtgctagatgaagagaaagacaaagatatggtacccagcctcttggaatttaaggcatctcttgataccatatgggaagaaagcttttctaagaatgaagcttttagtaacactatcaaggatgcatttgagcatctcataaacatccgccagaatcgacctgctgagctgattgctaagtttttggacgagaagcttcgtgctggcaataaaggtacatcagaggaggaattggaggggacattagataaagtcctggttttgttcaggtttatacagggtaaggatgtatttgaagcattctacaagaaggatcttgcaaaaagactgttgttgggtaagagtgcgtcaattgatgctgaaaagtccatgatttctaagttgaagaccgagtgtggcagccagttcaccaacaaattggaaggaatgttcaaggacattgaattatcaaaagagataaatgaatccttcaagcaatcttcccaagccagaacaaagctcccaacagggattgagatgagtgtccacgttctgacaatggggtactggccgacctatccccccatggatgttcgacttccccacgaactcaatgtctatcaggatattttcaaagagttctacttaagcaagtacagtggtaggcgtttgatgtggcaaaattcattgggccactgcgttctgaaagctgaatatccaaaaggaaaaaaggagctcgcagtttctcttttccagactgttgttttgatgctctttaatgatgcggaaaatcttagcttccaagatattaaggaagcaactggaattgaggataaagagctgagaaggactctacagtctcttgcatgtggaaaagttcgtgttctccagaagattccaaaaggaagagatgtggaggatgatgatacctttgtgtttaatgatcaatttactgctccactatatcgtataaaggtaaatgccatccagatgaaggaaacagttgaggagaacacaagcactactgagagagtatttcaggaccggcagtaccaggttgatgctgctattgttaggataatgaagaccagaaaagtgctgagtcataccctcttaataactgaactctttcagcagcttaaattcccaataaaaccagctgatctgaagaaaaggattgaaagcctcatagatagggagtacctggaacgggacaaaaacaatcctcaaatatacaactaccttgcttag

SEQ ID NO: 13834 - protein, 785 aa, Solanum lycopersicum
MKKAKSQALPCSIDSKNGQHVHFSSDIDDPSGNSPMMEDCNIDSSSVAGGVTANLSRKKATPPQPAKKLVIKLLKAKPTLPTNFEENTWATLKSAISAIFLKQPDPCDLEKLYQAVNDLCLHKMGGNLYQRIEKECESHIAAALRSLVGQNEDLVVFLSLVERCWQDFCDQMLMIRGIALYLDRTYVKQTPNVRSLWDMGLQLFRKHLSLASEVEHKTVFGLLQMIETERLGEAVDRTLLNHLLKMFTALGIYAESFEKPFLERTSEFYAAEGVKYMQQSDVPDYLKHVEVRLHEEHDRCLLYLDASTRKPLIATAERQLLEQHISAILDKGFTVLMDGNRIEDLQRMYMLFCRVNDLESLRQALSSYIRRTGQSIVLDEEKDKDMVPSLLEFKASLDTIWEESFSKNEAFSNTIKDAFEHLINIRQNRPAELIAKFLDEKLRAGNKGTSEEELEGTLDKVLVLFRFIQGKDVFEAFYKKDLAKRLLLGKSASIDAEKSMISKLKTECGSQFTNKLEGMFKDIELSKEINESFKQSSQARTKLPTGIEMSVHVLTMGYWPTYPPMDVRLPHELNVYQDIFKEFYLSKYSGRRLMWQNSLGHCVLKAEYPKGKKELAVSLFQTVVLMLFNDAENLSFQDIKEATGIEDKELRRTLQSLACGKVRVLQKIPKGRDVEDDDTFVFNDQFTAPLYRIKVNAIQMKETVEENTSTTERVFQDRQYQVDAAIVRIMKTRKVLSHTLLITELFQQLKFPIKPADLKKRIESLIDREYLERDKNNPQIYNYLA

SEQ ID NO: 13835 - DNA, 2736 bp, Aspergillus fumigatus (strain CEA10 / CBS 144.89 / FGSC A1163)
  CDS (1)..(2736)
atgcagcagaactcgagaggcgcccccgagcagaggagcggtaagcgcaagtcgatcggcaagaggaagctttctgatcaagaagaggcggcatttcggtctcagaattcgcaacagcatccgcagcagcaacaacaggcgaccatctccgagctcttatccaggaaccatacccacagcaagggttatcccccccaatcccctccatcgaacaagcgtcctcggctatcatcgccatcatcgcactcgcgggctccagtttcgtcacaggagcttcaaccgccagacaagatgtacaatttttcgaattcggaacatagaacaggtggagcgtttgcgcagagctccccggccaacacgacagtcaaaccccatttctcgaacacatcatcgcgtcagagcaattttacccctcataccggtgcaaaaaggcttgtggttaagaatctccggaccggttcgcggttgaatcaggattcctactttgacaaggtctgggcacagctggatgcagcgctgagcgccgtctttagcggcggaaagcccgagatttcactggaggagctctacaagggagcagagaatgtgtgtcgccagggaagagccgtggtgttgacccaacggctgcaggaccgatgccgagcgcacgtgtctgggagtctgcgggacgagttgctggcaaaggcagctgatgggagtaatgtggatacattgcgggctgtgattgacgcatggaacacttggaaatcgaagttgcgtcggtttgagtttgtctttcaaatgattgatgaagtcttccaggtcaccatccggtggatcttctactacctcgaccaatctttcctacttcattccaaagagtttccagttatccgtgaaatgggcttgatccagtttcggaatcacatattctccgaccctgtattacaaccgaaggttctacaaggggcttgtgacctagttgacgcagaccgcaatgaggatcatgctatgatggccgattcttctttgctccgaaatgctattgaactcttccatggacttgatgtctacacaacaagcttcgagcctctccttctttccgaatcgaagcgattcttcgtatcgtgggctcagcgagagtcctccggatatcttgccacatttgtggagaacggccataatctaatcgcgagagaagtcaaacgctgcgagctattctcgttgaaccgaagcaccaagcagaaattgtctgaacttctcgatcgtgtcttggtagcagatcaagagtcggtgttgcttaatgagaaggacgttcttgggttgcttcggactggcaacaagactgctctggagaagctctacaccctcttagagcgaaggcaactggggacgaaattgaagccagctttcaagaattatattgtggaagaaggctcgcagattgtctttgacgaggagaaggaggcggaaatggtagttagcttgctagaattcaaggcacagctggacgacacatgggttaactcgttccaccgcaatgaggagctgggtcatgccctgcgcgaagcttttgcaacctttatgaacaagagccggaaatcggaatctaccggcgggacagacaatgtcaagaccggcgagatgattgccaagtacgtagacaggctactgaaaggtggatggaagctggcacctgggcgcaatatggcggacgtgccgctggccgacgaggacgctgagattaaccgacaactggatcaagtgctggacctgtttcgattcgtcaacggcaaagcggtgtttgaggcattctacaagaacgacttggcccgtcggttattgatgggccgaagcgcaagtgacgatgcggagaagagcatgctagcaaggctcaagacagaatgcggttctacgtttacacacaatctcgagtccatgttcaaggatatggatgtcgcgcgagacgaaatggctgcatatgcctcgattcagcgcgaacggaggaaaccgctgccgatcgatctaaatgttagcgtgctctccgcctctgcatggccatcgtaccctgatgtgcaggtgcggattccaccggtcgttgccgaagcgattgatgactttgagaagttttactacaacaagtacaacgggcggaaactcagctggaagcatcagttggcgcactgccagctgcgagccaacttttcgcacggacagaaggagctggtggttagctcgtttcaagcgatcgtactactgctgttcaacgacgttcccgagggcggaagcctgagctatgctcagcttcaggaagggacgaaactttccgaccaggagctccaacgcaccctccagtcgcttgcatgcgccaagtatcgggtcctcaccaagaagcccaagggacgagacgtcaaccctacggatgaattctcgttcaatgcgagctttacggacccgaagttccggatcaagatcaatcagattcaactgaaggagacgaaggaggaaaacaagaagacgcacgagcgggtggcggccgaccgacatctggagactcaggcggccatcgtgcgaatcatgaagagccgcaagcagatctcgcacgctgaactggttgcagaggtgatcaaggcgactcggagccgaggagtgttggatgtcgcggagattaaaaacaatatcgaaaaactgatcgagaaggattacatggagcgagacacggagaccagtcccaatatgtacaaatatgtcgcataa

SEQ ID NO: 13836 - protein, 911 aa, Aspergillus fumigatus (strain CEA10 / CBS 144.89 / FGSC A1163)
MQQNSRGAPEQRSGKRKSIGKRKLSDQEEAAFRSQNSQQHPQQQQQATISELLSRNHTHSKGYPPQSPPSNKRPRLSSPSSHSRAPVSSQELQPPDKMYNFSNSEHRTGGAFAQSSPANTTVKPHFSNTSSRQSNFTPHTGAKRLVVKNLRTGSRLNQDSYFDKVWAQLDAALSAVFSGGKPEISLEELYKGAENVCRQGRAVVLTQRLQDRCRAHVSGSLRDELLAKAADGSNVDTLRAVIDAWNTWKSKLRRFEFVFQMIDEVFQVTIRWIFYYLDQSFLLHSKEFPVIREMGLIQFRNHIFSDPVLQPKVLQGACDLVDADRNEDHAMMADSSLLRNAIELFHGLDVYTTSFEPLLLSESKRFFVSWAQRESSGYLATFVENGHNLIAREVKRCELFSLNRSTKQKLSELLDRVLVADQESVLLNEKDVLGLLRTGNKTALEKLYTLLERRQLGTKLKPAFKNYIVEEGSQIVFDEEKEAEMVVSLLEFKAQLDDTWVNSFHRNEELGHALREAFATFMNKSRKSESTGGTDNVKTGEMIAKYVDRLLKGGWKLAPGRNMADVPLADEDAEINRQLDQVLDLFRFVNGKAVFEAFYKNDLARRLLMGRSASDDAEKSMLARLKTECGSTFTHNLESMFKDMDVARDEMAAYASIQRERRKPLPIDLNVSVLSASAWPSYPDVQVRIPPVVAEAIDDFEKFYYNKYNGRKLSWKHQLAHCQLRANFSHGQKELVVSSFQAIVLLLFNDVPEGGSLSYAQLQEGTKLSDQELQRTLQSLACAKYRVLTKKPKGRDVNPTDEFSFNASFTDPKFRIKINQIQLKETKEENKKTHERVAADRHLETQAAIVRIMKSRKQISHAELVAEVIKATRSRGVLDVAEIKNNIEKLIEKDYMERDTETSPNMYKYVA

SEQ ID NO: 13837 - DNA, 2211 bp, Oryza sativa subsp. indica
  CDS (1)..(2211)
atgagcgggggcgggccgccgaagaagcgcaacttcaagatcgagctgttcaagcaccgcgtggagctcgaacccaagtacgcggagcggacatggaaggtcctggagcacgccatccacgagatctacaaccacaacgccagtggcctctccttcgaggagctctacaggagtgcctacaacatggtgctccacaagtatggtgagaagctatatgatggcctggagagaactatgacatggcgcttgaaggaaatatcaaaatcaatagaggctgcacagggtggtttgtttctggaggagctgaatgccaagtggatggatcacaataaggcattgcagatgatccgagatattctaatgtacatggatcgaacatatgtcccgcaatcccgtagaacacctgttcatgagcttggtttgaatttgtggagggatcacataattcactctcccatgattcatagtcggctgcttgatacccttctggatcttattcacagggagagaatgggtgaaatgattaacagaggcctgatgaggagcataacgaaaatgttaatggatcttggtgctgctgtatatcaagatgactttgagaagccgtttttggatgttacagctagcttctacagtggagagtctcaggagttcattgagtgctgtgactgtgggaactatcttaagaagtccgagagacgtctcaatgaggaaatggaacgtgtctcacactacttggatgctggcactgaggcaaagataactagtgtggttgagaaagaaatgattgccaatcacatgcatagattggttcatatggaaaactcaggccttgtaaatatgcttgtagatgacaaatatgacgacttggctaggatgtacaacttattccgaagggtttttgatgggctatcgacaatcagagatgtgatgacttcatacctaagggaaacagggaagcagttagtgacagatcctgagaggttgaaagacccagtggaatttgttcagcgcttgttaaatgagaaggacaagcatgataagatcatcaacgttgcttttggcaatgacaaaactttccagaatgctctaaattcatcctttgagtacttcatcaacttaaacaacaggtcacctgaattcatatcgttgtatgttgatgataaactccggaaaggattgaaaggagccacagaagaggatgtggaggttattctggacaaagtcatgatgctgtttcggtacctccaggagaaggatgtatttgagaagtactacaagcagcatttggcgaaaagactattgtctggcaaaactgtttctgatgatgctgagaggagtatgatagttaaactcaagacagaatgtgggtaccagttcacttccaaattagagggcatgttcactgacatgaagacctctcaggacactatgatagacttttatgccaagaagtctgaggaacttggtgatggcccaacacttgatgtccacattcttacaactggttcttggccaacacagccctgccctccctgcaaccttccaactgaaatccttgcaatatgtgataagttccggacatactaccttggaactcacagtggccggagattgacatggcaaacaaacatgggaacagctgacataaaagccacatttgggaaaggtcagaagcatgaactaaatgtatccacttatcagatgtgtgttctcatgctgtttaattctaccgatgggttaacctacaaagacatcgaacaagatactgcgatacctgcctcggatctaaagagatgccttcaatctcttgcttgtgtcaaggggaagaatgttctccgcaaggaacccatgagcaaagatatatcggaggatgacacattctacttcaacgacaagttcacaagcaagcttgttaaggtcaagattgggacagtagtggcgcaaaaggaatctgagccagagaaacaagagactcgtcaacgggttgaggaggacaggaaacctcaaattgaggctgctatcgtcaggattatgaaatccaggagggtcttggatcataacagcattgtagctgaggttaccaagcaattgcaagcccgattcatgccgaatcctgttgtcataaagaaacgcatagaatctctaattgagcgtgaattcttagagagggacaaagcagataggaagttatatcgctatcttgcatag

SEQ ID NO: 13838 - protein, 736 aa, Oryza sativa subsp. indica
MSGGGPPKKRNFKIELFKHRVELEPKYAERTWKVLEHAIHEIYNHNASGLSFEELYRSAYNMVLHKYGEKLYDGLERTMTWRLKEISKSIEAAQGGLFLEELNAKWMDHNKALQMIRDILMYMDRTYVPQSRRTPVHELGLNLWRDHIIHSPMIHSRLLDTLLDLIHRERMGEMINRGLMRSITKMLMDLGAAVYQDDFEKPFLDVTASFYSGESQEFIECCDCGNYLKKSERRLNEEMERVSHYLDAGTEAKITSVVEKEMIANHMHRLVHMENSGLVNMLVDDKYDDLARMYNLFRRVFDGLSTIRDVMTSYLRETGKQLVTDPERLKDPVEFVQRLLNEKDKHDKIINVAFGNDKTFQNALNSSFEYFINLNNRSPEFISLYVDDKLRKGLKGATEEDVEVILDKVMMLFRYLQEKDVFEKYYKQHLAKRLLSGKTVSDDAERSMIVKLKTECGYQFTSKLEGMFTDMKTSQDTMIDFYAKKSEELGDGPTLDVHILTTGSWPTQPCPPCNLPTEILAICDKFRTYYLGTHSGRRLTWQTNMGTADIKATFGKGQKHELNVSTYQMCVLMLFNSTDGLTYKDIEQDTAIPASDLKRCLQSLACVKGKNVLRKEPMSKDISEDDTFYFNDKFTSKLVKVKIGTVVAQKESEPEKQETRQRVEEDRKPQIEAAIVRIMKSRRVLDHNSIVAEVTKQLQARFMPNPVVIKKRIESLIEREFLERDKADRKLYRYLA

SEQ ID NO: 13839 - DNA, 2208 bp, Picea sitchensis
  CDS (1)..(2208)
atgaataaccaccccagaaaggccttcagaatcgagccattcaggcacagggtggatatggatcccaaatatgccgagaagacctggaagattctcgaacatgcaatccacgagatctataatcacaatgccagtggcttgagttttgaagaactatacaggaatgcctacaatatggtgcttcacaaatatggggaaaagctctattctggccttgtgaccacaatgactggccatttgagggaaatggcaaagacaattgaagctgctcaggggagtttgtttttggaagggttgaatagaaaatgggtggatcataacaaagcactgcagatgattagagacattttgatgtatatggatagaacatatgttaccaactccaacaaaacacctgttcatgaacttggattaaatctgtggagagaccatatagttcgtgctgcaaaaattaaggataggctattgaatactcttcttgaacttgtacgttgtgaacgaacaggagaagtcatcaatcgaggtttaatgcgtaatattatcaaaatgcttacagagctggggccttctgtttaccatgaagattttgagaaaccttttgtggaagaggcgtcaactttctattctattgaatctcaacagtttattgaatgctgtgattgtggggactatctgcagaaagctgagagaaggctaaatgaagagatagagagggtttcacactatcttgattcaaagagtgaggtaaaaattacagctgtagttgagagagaaatgatagcaaatcatatgcagaggctggtgcacatggagaattcaggacttgtaagcatgcttgtggacgacaagtacgatgatctaggacgcatgtataacttgtttcgtcgggttcctgcaggacttgctacaatccgagatgtaatgactacccatttgcgtgaaacagggaagcagttagtgactgacccagagaaactgaaggatccagtggaatttgtgcaatgcctacttgatgagaaggacaagtacgacaagattataactgaggcattcaacaatgacaaaaccttccaaaattccttaaattcatcttttgagtttttcatcaatttgaatgcaaggtcacctgagtttatttctttgtttgttgatgacaaacttcggaaaggcctcaaaggcgtcaatgaagaagatgttgaagtagttttggacaaagtgatgatgttgttccggtatcttcaagagaaggatgtgtttgagaagtactacaagcaacacttggctaaacgacttctctcaggcaagactgtttcagatgatgcagagaggagcctaattgtaaaattgaagacagaatgtggttatcagttcacatcaaaattagaaggtatgtttacagatatgaagacttctcgtgacacaatgcaaggttttacttccatgttggctgcatccagtgaaggcaatgaaggccctacactggctgtccaggttctcacaacaggttcatggccaacacaaactggtgctaggtgcaacttgcctaaagaaatcttggcagtgtgtgacaagttcaaggcatactatcttagcactcatacgggccgtaggttgacgtggcagacaaacatgggaacagcagacttaaaagcaacctttggaaagggtcagaaacatgaactcaatgtctcaacttatcagatgtgcattcttatactttttaattcagcagatcgtttgagttacagagatattgaagaagcaacagatataccagctccagatttgaagagatgcttgcagtctcttgcatgtgttaagggaagaaatgtgctgggtaaggagcctatgagcaaggacataggcgaggaagatgatttttacttcaatgaaaagttttcctccaaattttacaaggtaaagataggcacagttgctgcacaaaaggagactgagccagaaaaacaggaaacacgtcaaagggtggaggaagataggaagccccaaattgaagctgctattgttaggattatgaaagcaaggcgtgttttagaccataacaatattgtggctgaggtaaccaaacagctacaatcacggtttttgcccaaccctgcagtaataaagaagcgaatagagtcactcattgaacgggagttcttagaaagggataagacagaccggaaattgtacaggtatcttgcctga

SEQ ID NO: 13840 - protein, 735 aa, Picea sitchensis
MNNHPRKAFRIEPFRHRVDMDPKYAEKTWKILEHAIHEIYNHNASGLSFEELYRNAYNMVLHKYGEKLYSGLVTTMTGHLREMAKTIEAAQGSLFLEGLNRKWVDHNKALQMIRDILMYMDRTYVTNSNKTPVHELGLNLWRDHIVRAAKIKDRLLNTLLELVRCERTGEVINRGLMRNIIKMLTELGPSVYHEDFEKPFVEEASTFYSIESQQFIECCDCGDYLQKAERRLNEEIERVSHYLDSKSEVKITAVVEREMIANHMQRLVHMENSGLVSMLVDDKYDDLGRMYNLFRRVPAGLATIRDVMTTHLRETGKQLVTDPEKLKDPVEFVQCLLDEKDKYDKIITEAFNNDKTFQNSLNSSFEFFINLNARSPEFISLFVDDKLRKGLKGVNEEDVEVVLDKVMMLFRYLQEKDVFEKYYKQHLAKRLLSGKTVSDDAERSLIVKLKTECGYQFTSKLEGMFTDMKTSRDTMQGFTSMLAASSEGNEGPTLAVQVLTTGSWPTQTGARCNLPKEILAVCDKFKAYYLSTHTGRRLTWQTNMGTADLKATFGKGQKHELNVSTYQMCILILFNSADRLSYRDIEEATDIPAPDLKRCLQSLACVKGRNVLGKEPMSKDIGEEDDFYFNEKFSSKFYKVKIGTVAAQKETEPEKQETRQRVEEDRKPQIEAAIVRIMKARRVLDHNNIVAEVTKQLQSRFLPNPAVIKKRIESLIEREFLERDKTDRKLYRYLA

SEQ ID NO: 13841 - DNA, 2235 bp, Picea sitchensis
  CDS (1)..(2235)
atgacgatgagcgagcggaagattatagagctggaggcgggatgggaatttatgcagaagggaattacgaagctcaagaacattctggaaggaaatcccgaacagcaaatcaattccgaggagtacatgatgctttacacgactatttacaacatgtgcacgcaaaagccaccgcaggattattcgcagcaactctatgacagatacagggagtcttttgaagagtacattacttcaatggtactacctgcattgagggagaaacatgatgagtttatgttgagagaacttgtagagcgatggggtaatcacaaaataatggttcggtggctttcacgtttctttaattatttggatcgttacttcattgcgaggcgttctcttccagcactaaatgaagttggtctcatgtgcttccgcgatctggtctaccaagaaattaagaataatgtgagggatgcagtgatcactctgattgatagggaacgtgaaggagagcaaattgatcgagctttgctgaaaaatgttctgggcatctttgtggagattgggatgggtaacatggatgcttatgagaatgattttgagtcagccatgttggaagacactgcttcttactattctcgaaaggctgcatcatggattttagaggattcttgtccagattatatgcttaaggctgaggagtgtctgaaacgagaaaaagaaagagttgcccattatttacattccagtagtgaacaaaagttgttagaaaaagtacaaaatgagctactttcccagtacgagagtcaacttctagagaaggagcattcaggttgccatgccttgctaagagatgacaaggtagatgatctttcaaggatgtataggttgttttataggatacctaaaggcttggaacccgtgtctctaatttttaaacagcacgttactggtgagggtacatcattagtcaagcatgcggaagatgcagcaagcaataaaaaggcagaaaaaaaggatgtggttggtgcacaagagcaggcatttgtgaggaaagttattgaattgcatgacaagtacttgcaatatgtcaacgagtgttttatgaaccactcccttttccacaaggcactgaaggaagcatttgaggtattttgtaacaagggagttgcgggaagcacaagtgcagaattattggctacattttgtgacaacatcttgaaaaagggtggtagtgaaaaattaagtgacgaagatattgaggatacacttgaaaaggtcgtcaagcttcttgcatacattagtgataaagatttatttgcagaattttacaggaaaaagcttgcacgcagacttctatttgataaaagtgcaaatgatgatcatgaaagaagtatattgacaaaattgaagcaacagtgtggaggccagtttacttctaaaatggagggaatggttacggatttaacgttagcaagggagaaccaaacaaattttgaggaatatcttaacgaaaacccacttgcacatcctggaatagacttgactgtgacagttttgacaactggattttggccaagttacaagtcatttgatcttaatctacctgctgagatggtcaaatgtgttgaggtgttcaaagagttttatcaaacaaaaactaagcatcggaagcttacatggatatattctttgggaacctgtaatattattgggaagtttgaccctaagccaatggaacttattgtaacaacttaccaggcatctgcacttttgctgttcaatgcgtcagagaggctaagttactctgaaatcaagtctcagttgaatttaactgatgaagatattgtcagactgctacactcccttgcatgtgcaaaatacaaaatcctcaataaagaaccaaacacaaaaactgtggcacaaacggattattttgaattcaatgcaaaattcactgacaaaatgaggagaatcaagattcctcttccaccagtggatgagaagaaaaaagtcattgaggatgtggacaaggatcggcgttatgcaattgatgcgtcaattgtaagaatcatgaagagccggaaagttttatctcaccagcagctagtgatggagtgtgttgagcaactgggacgaatgtttaagcctgatttcaaggcaatcaagaagagaatggaagatttgattacaagggaatacttggagagggataaagataatcccaacatgttcagatacctggcttga

SEQ ID NO: 13842 - protein, 744 aa, Picea sitchensis
MTMSERKIIELEAGWEFMQKGITKLKNILEGNPEQQINSEEYMMLYTTIYNMCTQKPPQDYSQQLYDRYRESFEEYITSMVLPALREKHDEFMLRELVERWGNHKIMVRWLSRFFNYLDRYFIARRSLPALNEVGLMCFRDLVYQEIKNNVRDAVITLIDREREGEQIDRALLKNVLGIFVEIGMGNMDAYENDFESAMLEDTASYYSRKAASWILEDSCPDYMLKAEECLKREKERVAHYLHSSSEQKLLEKVQNELLSQYESQLLEKEHSGCHALLRDDKVDDLSRMYRLFYRIPKGLEPVSLIFKQHVTGEGTSLVKHAEDAASNKKAEKKDVVGAQEQAFVRKVIELHDKYLQYVNECFMNHSLFHKALKEAFEVFCNKGVAGSTSAELLATFCDNILKKGGSEKLSDEDIEDTLEKVVKLLAYISDKDLFAEFYRKKLARRLLFDKSANDDHERSILTKLKQQCGGQFTSKMEGMVTDLTLARENQTNFEEYLNENPLAHPGIDLTVTVLTTGFWPSYKSFDLNLPAEMVKCVEVFKEFYQTKTKHRKLTWIYSLGTCNIIGKFDPKPMELIVTTYQASALLLFNASERLSYSEIKSQLNLTDEDIVRLLHSLACAKYKILNKEPNTKTVAQTDYFEFNAKFTDKMRRIKIPLPPVDEKKKVIEDVDKDRRYAIDASIVRIMKSRKVLSHQQLVMECVEQLGRMFKPDFKAIKKRMEDLITREYLERDKDNPNMFRYLA

SEQ ID NO: 13843 - DNA, 2271 bp, Micromonas pusilla CCMP1545
  CDS (1)..(2271)
atgatcaacgaccgcaaggtcatctccctggacgagggatgggagttcatgcagaacggcatcgtgaagctccggaacatcttagagggggagaagaacgaggagaacttcaatccggaggagtacatcaacctgtacactacgatctacaacatgtgcacgcagaaaccgccgcacgattactcccaacagctgtacgagcgataccgcgaggcgttcaacgagtacatcaccacgaaagtcctccccgcgctgcgcgaaaaacaaggcgagtacatgctgaaagagctcgtgaagcggtgggacaaccacaagatcatggtccggtggctctcgcgcttcttcaactacctcgaccggtattacatccaacgccacaacctcgcgcagctgaaagacgtcggcatgctgtgcttccgcgacctcgtcttcgcggagatcaagcgcacggtcaaggacgcggtgctgcagctggtggagaaagagcgcgacggcgaacaggtggatcgcgcgctgatgaagaacatcttgggcattttcgtggagatgggcatgggcgggatggacgcgtacgagaacgacttcgagtgccacttactcacgaacaccgcggcgttctacgccaagaaggcgacgatctggatcgaagaagactcgtgcccggactacctcgtgaaagcggaggagtgcctgcgcagagagaaagagcgcgtcgggcactacctgcacgcgagctccgagacgaagattctgaaggagtgcgagaaggaggttctcgcgcagtacgagacgcagctgctcgagaaggagcactccggcgcggcggtcttgctccgcgacgacaagaccgaggacttgggccgaatgtaccggctcttcaagcgcatccccgcggggttgccccccgtcgcggacatcttcaaaaagtacgtcgagcgcgagggagtgacgctagtcaaggcggcggaggaggcggcgacgcaaaagaaggaggcgaaagccgcggggggcgcggggaaggacgcgtcgaacgccgcgagcgcgtccacggagcagatgttcgtgaggaacgtcatcgagctccacgacaagtacctcgcgtacgtgggcgactgcttcagcaacgactcgctgttccacagggcgctgaaggaggcgttcgaggtgttttgcaacaagggcgtcgccgggagcacgtccgcggagctgctcgcgacgttttgcgataacctgctcaagaagggcagcagcgagaagctcagcgacgacgccgtggaggagacgctcgagaaggtcgtgcggctgctggcgtacatcagcgacaaggacctcttcgcggagttttaccgcaagaagctgtcgcggcggctgctcttcgacaagagcgccaacgacgaccacgagcggtcgatcctcacgaagctcaagcagcagtgcggcgcgcagttcacgtcgaagatggagggcatggtcacggacttgcagctcgcgcgggataaccaccgccccgcgttcgagaagtggatgtccgaggacgaggacaagcgcaggcccaaggttgacttccaagtcaccgtgctcaccaccgggttttggccgacgtacaagttcatggagctcgcgctcccgaaggagatggtcgagtgcgtggagacgttcaaggacttctacgaggcgcacttcgtgcacaggaagctgacgtggatctacgcgctggggatgtgccacgtcaaggcggcgttcaccgcgaagccgatcgagctccagatctcgacgtttcaagccgcgtgtctgctcctcttcaacgagacggactcgctgacgttcgaggaggtcaaagagcgtctgaacctcccgaacgaggacgtgattcgctcgctgcactcgctgtcgtgcgccaagtacaagatcctcacgaaaatcccggaggggaagacgatcgacgcgggcgacgtcttcagcttcaacgccaagttcacggatcgccttcgacgcatcaaggtgccgctgccccccgtggacgagaagaagaagaccgtggaggacgtggacaaggaccggcggtacgcgatcgacgccgcgatcgtgcggacgatgaaatcgcggaaggtgctcccgcatcagcagctcgtgctcgaggtggtgcagcagctcaaccggatgttcaagccagattttaagatgatcaaaaaacgcatcgaggacctcatcgcgcgggactacctcgagagagacaaggacgacgccaacgtgttcaagtacctcgcgtga

SEQ ID NO: 13844 - protein, 756 aa, Micromonas pusilla CCMP1545
MINDRKVISLDEGWEFMQNGIVKLRNILEGEKNEENFNPEEYINLYTTIYNMCTQKPPHDYSQQLYERYREAFNEYITTKVLPALREKQGEYMLKELVKRWDNHKIMVRWLSRFFNYLDRYYIQRHNLAQLKDVGMLCFRDLVFAEIKRTVKDAVLQLVEKERDGEQVDRALMKNILGIFVEMGMGGMDAYENDFECHLLTNTAAFYAKKATIWIEEDSCPDYLVKAEECLRREKERVGHYLHASSETKILKECEKEVLAQYETQLLEKEHSGAAVLLRDDKTEDLGRMYRLFKRIPAGLPPVADIFKKYVEREGVTLVKAAEEAATQKKEAKAAGGAGKDASNAASASTEQMFVRNVIELHDKYLAYVGDCFSNDSLFHRALKEAFEVFCNKGVAGSTSAELLATFCDNLLKKGSSEKLSDDAVEETLEKVVRLLAYISDKDLFAEFYRKKLSRRLLFDKSANDDHERSILTKLKQQCGAQFTSKMEGMVTDLQLARDNHRPAFEKWMSEDEDKRRPKVDFQVTVLTTGFWPTYKFMELALPKEMVECVETFKDFYEAHFVHRKLTWIYALGMCHVKAAFTAKPIELQISTFQAACLLLFNETDSLTFEEVKERLNLPNEDVIRSLHSLSCAKYKILTKIPEGKTIDAGDVFSFNAKFTDRLRRIKVPLPPVDEKKKTVEDVDKDRRYAIDAAIVRTMKSRKVLPHQQLVLEVVQQLNRMFKPDFKMIKKRIEDLIARDYLERDKDDANVFKYLA

SEQ ID NO: 13845 - DNA, 2436 bp, Drosophila melanogaster
  CDS (1)..(2436)
atgccagttccagctcctgctgctccagctgtcgttaaaactgaaactagtgcaaccacctctgggccatcaacctcagcttcagcgagcgcagaaagtacagaaaaacgctttaaggaaatagcacggaagtacccactctggctaccggagtacaagcgaagggcattcaatgcctccatggacgagaagtacgtggagaccatttgggccagcttaaagaatgctatccaggagatacagaaaaagaacaactccggactatcgtttgaacaactctaccggaatgcgtacaacatggtgctgcataagcacggcaatagactgtattacggtctgagggaggtcgtctcagaacacctggagcacaaggtgcgggcggatgtgctggaggctctgcacagcaatttcctacccaagttaaaccaggcctggacagaccaccagacatctatggtgatgatccgcgacatactcatgtacatggatagagtttatgtgcagcagcgcgaggtagacaatgtgtacaatttgggattaattttgttcagggatcaggtggttcgctattctgagattcaaaaggccctgcgagagaagttgctgggcatggtgatggaggaacgtcatggcgaagccattaaccatctggctatcaagaatgcttgcagtatgctgatcaccctggggattaactcgcgcactgtctacgaagaggactttgaaaagcccttccttgcgcaatcggcggcgttttacaaattcgagtcgcagaactttcttgccgagaacaacgctggcgtttacatcaagaaagtggaagcgcgcatcacggaggaatcttcccgggcagcgctgtatctcgataaggatacggagccccgcattgtgcgcgtggtcgaagaagagctgatcaaaaagcacatgcgacccattgttgaaatggagaactcgggcgtggtgtacatgatcaagaactcaaagaccgaggatctggcctgcacatataagcttttctcgcgcctgaaggaggagggtctcaaggtgatagcggacacaatgtcggcatatctgcgagagcaaggacgcatgctggttaaggaagaagaaaacggcaacacgaatcccataacattcgtgcagaacttgctggatctcaaggaccgcttcgaccagtttctggtgcactcgttcgccaacgatcgcatattcaaaaacgtcatctcatccgattttgaacatttcttgaacctaaataacaaatccccggagtatctatcgctattcatcgatgacaaactgaaaaagggtggcaagggaatgagcgaacaggaaattgagtccatcttggataagacaatggttctcttccgtttcctattggagaaagatgtctttgagcgctattacaagacgcatttagccaagagattgctgctgaacaaatcagtctctgatgatttcgagaagaatatgatatcaaaactaaagactgaatgcggctgtcaattcacctcgaagctagagggcatgtttaaagatatgtcagtctccaatacgatcatggatgagtttaagaactttgtaaataataacaatttatcccttggcggtgtggagctaacggtacgcatactaaccactggtttttggcccacacagacagcaactccgaactgcaatatacccgccgctccgcgtgaagcctttgacattttcaagaacttctatctaaataagcactcaggacgtcaattgacgttacagccacaaatgggaaccgcctatatcaacgctgtgttttatggccgcaaggcagttgaaagtgaaaaggataaagatgcacccagctccagttcaagcggctgtggggtgcccaccaccacacgcaagcacatattgcaagtgtccacgtaccagatgtgtgtgctactgctgtttaataaccgcgacgtgctcacctacgatgacatacaccaggagaccgatataccggaacgggagctcgtccgagcactacaatcgttgtccatgggcaaacccgctcagcgtttgttagtacgcaattctaaaacgaaaactaaggacattgagcccacggatgagttttacgtaaacgacgccttcaactccaagttccacagggtgaagatacaaacggtagccgccaagggagaatcagagccagagcgtaaggaaacgcgcggaaaggtcgacgaggatcgtaagcacgagatcgaagcggctattgtgcgcataatgaaggcccgcaagcgtctggctcacaacttgctagtatcagatgtgacgtcgcagctaaagtcgcgtttcttgccctcgcccgtgtttatcaaaaagcgcattgagggcctaatcgagcgcgagtatctgcaacgatcgccggaagatcgcaaagtgtacaactacttggcctaa

SEQ ID NO: 13846 - protein, 811 aa, Drosophila melanogaster
MPVPAPAAPAVVKTETSATTSGPSTSASASAESTEKRFKEIARKYPLWLPEYKRRAFNASMDEKYVETIWASLKNAIQEIQKKNNSGLSFEQLYRNAYNMVLHKHGNRLYYGLREVVSEHLEHKVRADVLEALHSNFLPKLNQAWTDHQTSMVMIRDILMYMDRVYVQQREVDNVYNLGLILFRDQVVRYSEIQKALREKLLGMVMEERHGEAINHLAIKNACSMLITLGINSRTVYEEDFEKPFLAQSAAFYKFESQNFLAENNAGVYIKKVEARITEESSRAALYLDKDTEPRIVRVVEEELIKKHMRPIVEMENSGVVYMIKNSKTEDLACTYKLFSRLKEEGLKVIADTMSAYLREQGRMLVKEEENGNTNPITFVQNLLDLKDRFDQFLVHSFANDRIFKNVISSDFEHFLNLNNKSPEYLSLFIDDKLKKGGKGMSEQEIESILDKTMVLFRFLLEKDVFERYYKTHLAKRLLLNKSVSDDFEKNMISKLKTECGCQFTSKLEGMFKDMSVSNTIMDEFKNFVNNNNLSLGGVELTVRILTTGFWPTQTATPNCNIPAAPREAFDIFKNFYLNKHSGRQLTLQPQMGTAYINAVFYGRKAVESEKDKDAPSSSSSGCGVPTTTRKHILQVSTYQMCVLLLFNNRDVLTYDDIHQETDIPERELVRALQSLSMGKPAQRLLVRNSKTKTKDIEPTDEFYVNDAFNSKFHRVKIQTVAAKGESEPERKETRGKVDEDRKHEIEAAIVRIMKARKRLAHNLLVSDVTSQLKSRFLPSPVFIKKRIEGLIEREYLQRSPEDRKVYNYLA

SEQ ID NO: 13847 - DNA, 2664 bp, Nannizzia otae (strain CBS 113480)
  CDS (1)..(2664)
atgcctactccctcctctggcgggaaccgcaaacaaatgggtaaaaggaaatacaaagacccaagtcgagacgaatcgcaagacgagcaggaacagagacagaagacaatcccggatctcttttgcagagatcacctcagtaccggctacaaaccgtcccctctatcgccgtccagtaagcgggtacggcgcaacgaatgcgactccgccattaaggcttcgtccgaagagctagcacctatcaccgtcgacaagatgtacaagttcaccagctcagacggcaagggaagcaatgggagtgcgtttgggttcgctcgcgctgataaccgaacaccgttggcgagaacgagaccgtttaattcctcgaacccaagcagctttacaccccacacaggcgcaaagacactcaaggtcaagaatctacgtgacgctcccagccttgaccagcagctctactttgataaagtgtggtctcatctagactccgccctcacagcaatattcaaccatgagaagcttccatattcgttagaggagctgtacagaggggttgagcatgtgtgtaggcagggaagagcggcaaatctggcgaagaatttaagggagcgttgtatggggcacatatcaggaaaagttatggaatcactactcgccaaatctgcaactggagatgagacagtggtattgcgggcggtggaggccgcatggactcagtggaatgtgcgactagtgacgattcggtcaattttctactacttagaccaatctttcctcttgcattcccccaataatcccgttatatatgaaatgggcctgctccagtttcgatcaactgtgttttctgatgcctccctgaaatcaaaggtatttcaaggagcctgccttttagtcgagttagataggcaggaggataactatgccgatcctaccctattaaggagttccatcaaactgttccacgacctgaagatatacactgctcattttgagccatgcatgctcgagaactcggcaacgtactataagaactgggctgcaggccaagtcgctggcgagaaccttgccagctacgtcgaaaagtcgtatcgacttattgagcgcgagatggctcggtgtgacctcttctcgttcgacagagggacaaagcagaagttggccgagctgctggatcataacctgatggttaatcagaagaagttccttctcaacgaggccgacatcattagtctgcttcgagcaaacaacgccacagctctggagcggctattctccatgttagaacgaaaaggcatgggtgttgatgtgaagtcagcgtttagcaaatacatcatcgaagaaggttctaccatcgtcttcgatgaagctcgtgaggcagaaatggtcatcagacttcttggtttcaagcagagtctggatcatatctggaaattctcattccataaccatgagcaactcggccatgctcttcgtgaatcctttgaggcttttatcaaccaacacaaaaagacggattcaaactggggcacagacaaccccaagcctggcgagatgattgcgaaacatgttgatcagttgctcaaagggggcgtgagagcaatgcagaaccgtccagtcgaagacatcaccggcaatgccagccttaccgacgaagatgcggaaattaataaacaactcgatcaagttttggatctcttccgattcgtgcatggcaaagcagtctttgaagccttctacaagaacgacctagcaaggagactgctaatgggtaggagtgccagtgatgaagcggagaaaagtatgctctcaaggctgaaatcagagtgtggctccaactttacccacaacctcgagaccatgttcaaagacatggatcttgcgcgggacgagatggcttcgtataacgctctgctgagggagaagaacgagcgaccaaaggtcgacctcaatgtcaatgtcatctctgccaccgcatggccaagctacgtagacgtgcccgtcaacatcccagaatccatatctcgagccatcaccaacttcgaggagttctataacaacaagtacagcgggaggaggctacactggaaacatactctagcgcactgtcagttaaaggcgcggttcccactcggagacaaggaactagttgtaagttcgttccaggccatcgtgctgctcctgttcaacgacgttgcgggctcagagacgctatcgtaccctgtcatcaagcaagcttccggcctttcggatgtggaattaaaaaggacactacagtcgctagcttgcgctaaataccgcgtcctcctcaagaagccgaaaggcaaagaagtcaacgaggacgatgtgttcgcgtacaattccaagttcgaggaccagaagatgcgcatcaagatcaaccaaatccagctcaaggagaccaaacaggagaacaagacgacacacgagcgtgttgccgcagaccgacagtatgagacgcaagccgctattgtccgcatcatgaaaagccgcaaggtcatcacgcattcagacctggttgcagaggtgatcaaggccaccaagaatcgcggtcagctcgagcttggcgatatcaagaagaacattgacaaactcctggaaaaggactacatcgaacgggaagagaacaaccggtacaagtatctcgcctag

SEQ ID NO: 13848 - protein, 887 aa, Nannizzia otae (strain CBS 113480)
MPTPSSGGNRKQMGKRKYKDPSRDESQDEQEQRQKTIPDLFCRDHLSTGYKPSPLSPSSKRVRRNECDSAIKASSEELAPITVDKMYKFTSSDGKGSNGSAFGFARADNRTPLARTRPFNSSNPSSFTPHTGAKTLKVKNLRDAPSLDQQLYFDKVWSHLDSALTAIFNHEKLPYSLEELYRGVEHVCRQGRAANLAKNLRERCMGHISGKVMESLLAKSATGDETVVLRAVEAAWTQWNVRLVTIRSIFYYLDQSFLLHSPNNPVIYEMGLLQFRSTVFSDASLKSKVFQGACLLVELDRQEDNYADPTLLRSSIKLFHDLKIYTAHFEPCMLENSATYYKNWAAGQVAGENLASYVEKSYRLIEREMARCDLFSFDRGTKQKLAELLDHNLMVNQKKFLLNEADIISLLRANNATALERLFSMLERKGMGVDVKSAFSKYIIEEGSTIVFDEAREAEMVIRLLGFKQSLDHIWKFSFHNHEQLGHALRESFEAFINQHKKTDSNWGTDNPKPGEMIAKHVDQLLKGGVRAMQNRPVEDITGNASLTDEDAEINKQLDQVLDLFRFVHGKAVFEAFYKNDLARRLLMGRSASDEAEKSMLSRLKSECGSNFTHNLETMFKDMDLARDEMASYNALLREKNERPKVDLNVNVISATAWPSYVDVPVNIPESISRAITNFEEFYNNKYSGRRLHWKHTLAHCQLKARFPLGDKELVVSSFQAIVLLLFNDVAGSETLSYPVIKQASGLSDVELKRTLQSLACAKYRVLLKKPKGKEVNEDDVFAYNSKFEDQKMRIKINQIQLKETKQENKTTHERVAADRQYETQAAIVRIMKSRKVITHSDLVAEVIKATKNRGQLELGDIKKNIDKLLEKDYIEREENNRYKYLA

SEQ ID NO: 13849 - DNA, 2265 bp, Nannizzia otae (strain CBS 113480)
  CDS (1)..(2265)
atgcctcccgcaaggtttgcggcgcctcatcgagatgatcttgacgaaacatggacatttctcgagcagggaatcgagagggtgatgaccgacctgaatagtggtatcgacatggcttctattaacttagtatacagtgctgtccataatttctgtacctcacaaaaagcattcacaagccactcctcttcttcgcatggcacgcgaggcgcccatttacttggtgaggagctttacaaccttctcgggcattacctctcccgccacctcgaaggggtctataaagcttccctcagtcactctgatgaacccctcctttcgttctatatcagagaatggacccgctatactaccgccgccaaatacatcaaccatcttttcagatacctaaaccgccactgggtaaagcgagaagttgacgagggtaagaaagatatctacgatgtgtacactctacacctcgtcagatggaaggaggacttcttcagacttgtccacgagaacgttatgggtgctgttctgggtctcatcgagaagcagcggaatggcgaaactattgaacagtcccagatcaagcatatcgttgactctttcgtctctctcggcctagatgagaacgatacttccaagccaactctggttgtttaccagtactactttgaaaagccattcatcgaggccaccagggcctactacgatagggaatctaagcgattcgtcgctgaaaacagtgtcgtcgaatacatgaagaaagcagagcttcgattagaggaagagcgcgctcgcatcgacctgtaccttcacccagatgtcactaagaatctgacagaaacttgtttggatgttttagttacttcgcattgtaacctcttgcgagacgaattccagcccctcctggacgcggaacgacaggatgaccttgctagaatgtatcgattactgtcgaagataaaggacggcctcgatccgctaagaaacaggttcgaaactcacgtgaggaaggctgggctgtctgcaattgcaaaggtagcttcagggagtgagggtgttgatccgaaggtctatgtcgactcccttctacaggtacacggaaagtatagatcaatggtagacgaagcctttgccggtgaaacagaattcgttcggtctttggataacgcctgccgcgaattcgtcaaccgtaacgccctctgcaccactagctcgaccaaatccccagaactgttggccagatataccgactctctgctcaaaaagggcgccaagtcctccgaggaatcagagctcgaagagcttctcgtccagatcatgaccgtttttaaatacatcgaagacaaggacgtcttccaaaagttctactcccgaatgcttgccaagcgacttgttcacgtcagttcagtatccgacgatgccgagaccagcatgattagcaaattgaaggaagcttgcggtttcgagtacaccaacaagctccaacgaatgttccaggatatccagatctcaaaggatcttaatgccaactaccgcgagtggcaggagaagacttttgatgaggaagaccgcaagaaaatggtcgacccacacttccaggttcttggtaccggcttctggcctctcaaccctccgtcaacgcaattcatccctccccaggtcatcaacaagaccgtcgaacgcttcaagtcgttctacttcgataagcatagtggccgcgaaatcaaagccaactacgtcaagaatacaaaggtcccttatacattccaggtatccacctatcaaatgggcatacttctcctatataatgacaatgatagccttgagtactctgagattgagaaggccacggctctctcctcggacatcctagaccccaaccttggcatctttgtcaaggctaaagtcctcattccctccccggagaatgcgaagccaggcccaggaacttcatacgtactaaactaccatttcaaagcaaagaaaatcaaggttaatttgaacattcaagtcaaatccgaacaaaagcatgaggccgaggacacacacaagactgttgaagaagacagaaaattggttctccagtctgccattgtacgtatcatgaaatcccgcaaacgcatgaagcacgtccagcttgttcaagaggtcatccagcaagtcagcgcccgcttcccacccaaaatctcagacatcaagaaaaacattgaaggcctgatggagaaggaatacattgaacgcatggatggtgatgaaatatcttatattgcttaa

SEQ ID NO: 13850 - protein, 754 aa, Nannizzia otae (strain CBS 113480)
MPPARFAAPHRDDLDETWTFLEQGIERVMTDLNSGIDMASINLVYSAVHNFCTSQKAFTSHSSSSHGTRGAHLLGEELYNLLGHYLSRHLEGVYKASLSHSDEPLLSFYIREWTRYTTAAKYINHLFRYLNRHWVKREVDEGKKDIYDVYTLHLVRWKEDFFRLVHENVMGAVLGLIEKQRNGETIEQSQIKHIVDSFVSLGLDENDTSKPTLVVYQYYFEKPFIEATRAYYDRESKRFVAENSVVEYMKKAELRLEEERARIDLYLHPDVTKNLTETCLDVLVTSHCNLLRDEFQPLLDAERQDDLARMYRLLSKIKDGLDPLRNRFETHVRKAGLSAIAKVASGSEGVDPKVYVDSLLQVHGKYRSMVDEAFAGETEFVRSLDNACREFVNRNALCTTSSTKSPELLARYTDSLLKKGAKSSEESELEELLVQIMTVFKYIEDKDVFQKFYSRMLAKRLVHVSSVSDDAETSMISKLKEACGFEYTNKLQRMFQDIQISKDLNANYREWQEKTFDEEDRKKMVDPHFQVLGTGFWPLNPPSTQFIPPQVINKTVERFKSFYFDKHSGREIKANYVKNTKVPYTFQVSTYQMGILLLYNDNDSLEYSEIEKATALSSDILDPNLGIFVKAKVLIPSPENAKPGPGTSYVLNYHFKAKKIKVNLNIQVKSEQKHEAEDTHKTVEEDRKLVLQSAIVRIMKSRKRMKHVQLVQEVIQQVSARFPPKISDIKKNIEGLMEKEYIERMDGDEISYIA

SEQ ID NO: 13851 - DNA, 2445 bp, Nannizzia otae (strain CBS 113480)
  CDS (1)..(2445)
atgaagccacgggccaaagtccgggtccctagaaggggaatgacggggcggaacgagaacgatgacttcgcctctatctggagcatattggcatcttccatacgtgaaattcataccaaaaactcctctctgctctcttttgaagagctttatcgaagtgcttataagcttgtcttacgcaaacaggctatggatctatacgataaagtagccaacttggagaaggattggttatacaacgaagttcgcgggcaagtcgcaagtttaattactccggctctgctcaccatcaccgactcagctgatacaattgagcatgcaaacgaaagaaaggcagcgggagagcggttactaataaagctcaaggaagtctgggaagaccatcagctctgcatgggcatgatcacggatgttctgatgtacatggaccgtgtagtgatgcaagaactccgtcagcaatccatattcgatacatcaatgtgtttcttccgcgactgcgtcctgagatccgacattggtggagatgagagcgctactatttcttccgtcttcgaaaacacacttctcttcatgatacggcttgaacgtgaaggagttatcatagaccgcgctctgatcaggcactgtgtctatatgctggaaggcctctacgaggatggtatggatcaggcaagtgggaaattataccataccacctttgagcctgcgtttcttaaagcaagccgcagatactacgccgcagaaggtcagagactgctaacaaccaccgatgcggccactttctgtaagcgagtcacggctagaatcagagaggagcagtcgtggtgtcagcaaacattgtctcccgggacggaggccaaaattatggaagttatcgatgactgccttatcagagactatatcggcgaggtcatacgcatggacgacagcggtgtgaaatatatgacccaaaacgacagattggaggacttgcgcaatgtccacgagctcatcagtcgcgttgatgtaaaaaaggcagctttaacgaaggttgtgcagcagaccgtcgttgaatatgggacggccatcaacaatgcagcccaggaattctcacagaatccatcagcatctacgacgccggataaacagccggctatgaacttgcagactgctgccgcaataaagtgggttgacgatgtcctccagctgaaggagaaatttgatcgaatatgggaagaagcatttgtcaaagatcaattaatgcagacatctcttacgacaagtttctcggactttattaatattaaccctagaagtactgaatatctatctctcttctttgacgaaaacctgagaaagggtatcaagggcaagacggaagaagaggttgacacacttatcgacaatgggatcaccctactacgatacattcgcgataaagatctcttcgaggtatattacaagaaacatctctctcgccgactgcttatgaagcggtcggtaagtatggatgctgagcgccagatgattgcgaaaatgaagatggaggtagggaacacattcacacagagactggagtccatgttcaaggacatggctgtctccactgacctcacctctaattatcgggattatatctcgcgacagggtgatccagatcccaagcgagtcgaattggaaatgagtgttctcacaagcacgatgtggcctatggacataatgagtagttacaacagaaacggacaggtccaacctccatgcgtcttccctaaaaatatcgaatcactcaaacagagctttgaacgattttaccttgataagcatagtgggagaaagttgtcgtggttgccgggcatgggaacagctgatataagagccaccttcagacggcctaacggcaaggtcgaacgacacgatctcaatgtctcaacatatgcaatggtcatcctactgcttttcaatgaattgcctgttggcgagtccctcacatttgaggaaatccaagaacaaactaatatccccactaacgaacttataaggaaccttcaatctctcgccgttgcaccaaagactcgtgttttgcgcaaagagccaatgagtaaaggcgtgcaacctacggatagattcttcttcaatgaccagtttacaagcaagtttacaagactgaagatcggtgtcgttagctctggcggaaacaaggtagagaacaaggaggagcgaacagaaacggagaagaagaccagtgatgagcgaggaggtaccatcgaagcagccattgtgcgaatcatgaaacaacgaaaaaaactggcgcactcgcagttgatcacggaggtaatctcccagcttgccgcacgcttcacaccagatgtgaacatggtaaagaaacgaattgaaagcttaatagaccgcgaatacttggagcgcgtcacggattcagatccaccagcgtacacttatgttgcatag

SEQ ID NO: 13852 - protein, 814 aa, Nannizzia otae (strain CBS 113480)
MKPRAKVRVPRRGMTGRNENDDFASIWSILASSIREIHTKNSSLLSFEELYRSAYKLVLRKQAMDLYDKVANLEKDWLYNEVRGQVASLITPALLTITDSADTIEHANERKAAGERLLIKLKEVWEDHQLCMGMITDVLMYMDRVVMQELRQQSIFDTSMCFFRDCVLRSDIGGDESATISSVFENTLLFMIRLEREGVIIDRALIRHCVYMLEGLYEDGMDQASGKLYHTTFEPAFLKASRRYYAAEGQRLLTTTDAATFCKRVTARIREEQSWCQQTLSPGTEAKIMEVIDDCLIRDYIGEVIRMDDSGVKYMTQNDRLEDLRNVHELISRVDVKKAALTKVVQQTVVEYGTAINNAAQEFSQNPSASTTPDKQPAMNLQTAAAIKWVDDVLQLKEKFDRIWEEAFVKDQLMQTSLTTSFSDFININPRSTEYLSLFFDENLRKGIKGKTEEEVDTLIDNGITLLRYIRDKDLFEVYYKKHLSRRLLMKRSVSMDAERQMIAKMKMEVGNTFTQRLESMFKDMAVSTDLTSNYRDYISRQGDPDPKRVELEMSVLTSTMWPMDIMSSYNRNGQVQPPCVFPKNIESLKQSFERFYLDKHSGRKLSWLPGMGTADIRATFRRPNGKVERHDLNVSTYAMVILLLFNELPVGESLTFEEIQEQTNIPTNELIRNLQSLAVAPKTRVLRKEPMSKGVQPTDRFFFNDQFTSKFTRLKIGVVSSGGNKVENKEERTETEKKTSDERGGTIEAAIVRIMKQRKKLAHSQLITEVISQLAARFTPDVNMVKKRIESLIDREYLERVTDSDPPAYTYVA

SEQ ID NO: 13853 - DNA, 2301 bp, Coccidioides posadasii (strain C735)
  CDS (1)..(2301)
atgcctcctctcaacatgttatcctccaacagagaagttgcagaaacatggacgttcttggagaggggtgtcgatcgggttatgaacgacctcgagagtggaattgacatggccacgtatatggatatttacaccgccgtacataacttttgcacctcccaaaagttccagacctcatcccaaaccaccaacacaggccatcgtggaggaaaatctcacctcctcggcgaggaaatctacatccctcttggcaactatctcacgcgccatctcaacagcgtctttgaaacctcactcagccattcggaagaagcccttttagcgttctatattcgagaatggtcccgctatacaaccgctgcgaaatacataaaccacctcttcctatacttaaaccgtcactgggtgaagagagaggtcgatgaaggcaaaaaggggatttttgatgtatacactctacaccttgtgaaatggagggaagactttttcaagaaggttcatgaaagtgtgatgactgccgtgctcaaccttgtggagaagcaacgaaacggtgagaccattgagcaatcacagattaagaacatcgttgattcctttgtttctctcggcctggacgacaatgatacatctaagacgactctcgtagtttatcagtactacttcgagagaccatttattgaagcgaccagagcctactacgagagtgaatcaaggcggttcgttgctgagaacagtgtggtggaatacatgaaaaaggcagaatccaggttggaagaagagcgaggtcgagtggacctgtatctgcatcctgatatcaccaaaaacttgatggacacttgtttgtcagtgctcgtttcagcgcattcgtcattgttacgagacgaattccaatccctcctggatgctgagaggcaggatgatcttgctcgaatgtacaggctactttccaggataaaggacggccttgaccccctgcgaaataagtttgagactcacgttagaaaagcgggtctggctgcagtcgacaaaattgctgcaagcagcgacaacgtggaacccaaagtgtacatcgacgctctcttgcaggtacactcgaagtataaaaatatggttgatgtggcctttgctggtgaatcagaatttgtccgatcgctagacaacgcttgtcgcgaatttgttaaccgaaatgctctctgccatacaagctctaccaagtcgcccgaactacttgctcgatataccgattctttactcaagaaaggtctgaagaccccggaggagtctgaatacgaggaacttcttgcgcaaatcatgactgtcttcaagtatattgaagataaggatgtgttccaaaagttttactctcgtatgctcgctaaacgcctcgttcatgtcagctccgtatccgacgacgctgagaccagtatgatcagtaagctcaaagaggcctgcggttttgaatatacgaacaagctacagcgcatgtttcaagatattcagatctccaaggatctcaatgccagctataaagactgggcggcaagcactttcgatgaagaagatcgcaagaagatggttgacccgcatttccaaattttgggaaccggattctggcccctcaatccccctactacgcaatttattccgcctgcggaaattctgaagaccactgagcgtttcaagagcttttattgcgacaagcatagcggtcgtaagctcacctggctttggcaactgtgcaaaggtgaaatcaaagcgaattatattaaaaacactaaagtcccgtataccttccaagtctcaacttatcagatgggtattcttctgctgtacaatgagcatgatactctagattacggagagatcgagaaggcaacatcgttgtccccagagatacttgatccgaaccttggtattttagtaaaagccaaggttctccttccatccccggaggatggcaagccccgtgctggaacttcgtattctttgaactataacttcaaagcaaaaaagatcaaggtcaatcttaacattcaagtaaaatctgaacaaaagaccgaatcagacgatacacataagaccgtcgaggaggaccgaaagcttcttttgcagtctgcaatcgtgcgcattatgaaatcgcgcaagaagatgaagcatgtccagcttgtacaggaagttattcaacaagtgaaagcacgtttccctccgaaggttccagacattaagaagaacattgaggcgttaatggaaaaagagtacattgagcgattggacggcgacgagttggcgtacatagcataa

SEQ ID NO: 13854 - protein, 766 aa, Coccidioides posadasii (strain C735)
MPPLNMLSSNREVAETWTFLERGVDRVMNDLESGIDMATYMDIYTAVHNFCTSQKFQTSSQTTNTGHRGGKSHLLGEEIYIPLGNYLTRHLNSVFETSLSHSEEALLAFYIREWSRYTTAAKYINHLFLYLNRHWVKREVDEGKKGIFDVYTLHLVKWREDFFKKVHESVMTAVLNLVEKQRNGETIEQSQIKNIVDSFVSLGLDDNDTSKTTLVVYQYYFERPFIEATRAYYESESRRFVAENSVVEYMKKAESRLEEERGRVDLYLHPDITKNLMDTCLSVLVSAHSSLLRDEFQSLLDAERQDDLARMYRLLSRIKDGLDPLRNKFETHVRKAGLAAVDKIAASSDNVEPKVYIDALLQVHSKYKNMVDVAFAGESEFVRSLDNACREFVNRNALCHTSSTKSPELLARYTDSLLKKGLKTPEESEYEELLAQIMTVFKYIEDKDVFQKFYSRMLAKRLVHVSSVSDDAETSMISKLKEACGFEYTNKLQRMFQDIQISKDLNASYKDWAASTFDEEDRKKMVDPHFQILGTGFWPLNPPTTQFIPPAEILKTTERFKSFYCDKHSGRKLTWLWQLCKGEIKANYIKNTKVPYTFQVSTYQMGILLLYNEHDTLDYGEIEKATSLSPEILDPNLGILVKAKVLLPSPEDGKPRAGTSYSLNYNFKAKKIKVNLNIQVKSEQKTESDDTHKTVEEDRKLLLQSAIVRIMKSRKKMKHVQLVQEVIQQVKARFPPKVPDIKKNIEALMEKEYIERLDGDELAYIA

SEQ ID NO: 13855 - DNA, 2652 bp, Coccidioides posadasii (strain C735)
  CDS (1)..(2652)
atgcagaatcacgggacacgtgggacgcgcaaaccaggcggcaagaggaagctctgcgacggaaactcagaaacagccgaagacttggtacgaaatagtcaaggcacaattcccgatcttttctcgagggggaggaataccatatttggccataagagtcggcaactgtcaccaacgagcaaacggctgaagcggaacgaacttgatccccagcagcaaagcccgtccaaacagtcgcagccagctcaagaacgtatccccgtggagagaatgtacaactttccgaaccaaagcgccaaaagctcctcgctagggcagcaaaacagtcgcaccgtcccgcggacgtacctaaacccatcgtctaccccgtcgaacttcacacctcacaccgggcctaagcggctcactgtcaagaacctccgagtggtgccaaaacttgaccaagagcaatattttgagaagatctgggctcagcttaacaccgccttaacggcgatctttaatgaacaaaagccgtcgttctcattagaggagctgtacaaaggggctgaaaatgtttgccgccagaaacgtgcccagagcttagcaaagaagctccaagagcgctgcaaagtttacatatccgagagtgtactcccatccttgctggcaaaatcgaaagatagtgacgatattgttgtgttgcgggcggtggaggcagcatggtcggcgtggagctcccgtttagttacaatacgatcgatattctactacctagaccagtccttccttcttcgctccccggagcacccaaccatctatgaaatgggcacgatcgggtttcggtctattgtcttctccaacccatctctcaagccgaaaatgctgcaaggagcatgccagctagttgatcttgacagaaataatgatgcatcttctgattctacgttgctcaggaacgctatcaagctattctcggacctaagagtttacaaaagtgaattcgagcccgctatgctggaggcttcagacagatatttaaaggcatgggcggataatgaagcgaattcgagttatcttgctacatacgtgagtaaaagtcaccgggttattgaaaaggagatggagagatgcgatcttttcaaccttgatatcgacacaaaacaacgcctatcggaaatgcttgataagcgcctggtatcagatcaaagtgacacgcttctaaaagaaagcgacgtactaggcctcctcaggacaagtaaccaaattgcccttggggagctatattcactactacagagaatcgacctgggatcgaagttaaaacctgcgtttacctctttcatcttagaagagggctcttcaattgtttttgataaggaaagagaaggcgaaatggtcgttaggcttctcgattttaaacaaaacttggatgatatcttggcaaagtccttccaaaaggatgagcttttagctcgcgctctcagggagtcatttgaaacgtttatcaacaagagccaaaagggtggtgatgttgcccagcctggagaaatgattgcaaaacatgtggatctactgcttagggggggacttaaatcgatccgcaaacgccaagtcccactgaaaaatgacgaagacattgcaatgattgacgaggatgccgaactaaacaaagcacttgatcaggtccttgatctgtttcgtttcgttcatggcaaagcagtctttgaggcattctataaaaatgatcttgctcgtcgtctccttatgggaagaagcgccagcgacgatgcagaaaagagcatgctggctagattagcatcagaatgcggttcaaacttcacacacaatctcgagtctatgtttaaggacatagatcttgctcgtgatgagatggcttcatataacgctctactgcgcgaaaaaagggaaaaaacaaatttggacctttacgtcaacgtcctttcatctgcagcctggccgtcttacccagatgtgcctgtaaaagtgcctcgaataatatcgagcgcactctccgatttcgagcacttttacaacaacaagtataacggcaggaagcttaattggaaacactctcttgcccattgtcaattgaaggcgaggtttcctagcggtaacaaggagatcgttgtcagttcgttccaagccattgtcctgctcttgttcaatgatgtagcagatggacagacgttatcctatcatgatatccgggatgagacaggtctttccgatattgaattgaagcgtacacttcaatcccttgcatgtgctaaataccgagtcctcatcaaacatccaaagggaagagacattaacgcaactgatacctttagtttcaacaccaggttttcagacccaaagatgcggattaaaattaaccaaatccagttgaaagagactaaagaggaaaacaaggaaacgcatgaacgtgttgcggcagacaggaattacgaaacccaagcagccattgtgcgcatcatgaagagccggaagaccatttctccgcaggagcttatcgtagaggtgattaaggcaacaaggaatcgcggtgacttggacccagcggatataaagaaaaacatcgacaagcttattgaaaaggagtatatggaacgagacacggagtcaaataagtacaagtatatagcataa

SEQ ID NO: 13856 - protein, 883 aa, Coccidioides posadasii (strain C735)
MQNHGTRGTRKPGGKRKLCDGNSETAEDLVRNSQGTIPDLFSRGRNTIFGHKSRQLSPTSKRLKRNELDPQQQSPSKQSQPAQERIPVERMYNFPNQSAKSSSLGQQNSRTVPRTYLNPSSTPSNFTPHTGPKRLTVKNLRVVPKLDQEQYFEKIWAQLNTALTAIFNEQKPSFSLEELYKGAENVCRQKRAQSLAKKLQERCKVYISESVLPSLLAKSKDSDDIVVLRAVEAAWSAWSSRLVTIRSIFYYLDQSFLLRSPEHPTIYEMGTIGFRSIVFSNPSLKPKMLQGACQLVDLDRNNDASSDSTLLRNAIKLFSDLRVYKSEFEPAMLEASDRYLKAWADNEANSSYLATYVSKSHRVIEKEMERCDLFNLDIDTKQRLSEMLDKRLVSDQSDTLLKESDVLGLLRTSNQIALGELYSLLQRIDLGSKLKPAFTSFILEEGSSIVFDKEREGEMVVRLLDFKQNLDDILAKSFQKDELLARALRESFETFINKSQKGGDVAQPGEMIAKHVDLLLRGGLKSIRKRQVPLKNDEDIAMIDEDAELNKALDQVLDLFRFVHGKAVFEAFYKNDLARRLLMGRSASDDAEKSMLARLASECGSNFTHNLESMFKDIDLARDEMASYNALLREKREKTNLDLYVNVLSSAAWPSYPDVPVKVPRIISSALSDFEHFYNNKYNGRKLNWKHSLAHCQLKARFPSGNKEIVVSSFQAIVLLLFNDVADGQTLSYHDIRDETGLSDIELKRTLQSLACAKYRVLIKHPKGRDINATDTFSFNTRFSDPKMRIKINQIQLKETKEENKETHERVAADRNYETQAAIVRIMKSRKTISPQELIVEVIKATRNRGDLDPADIKKNIDKLIEKEYMERDTESNKYKYIA

SEQ ID NO: 13857 - DNA, 2235 bp, Lilium longiflorum
  CDS (1)..(2235)
atggcgatgcacgagcggaagacgatcgatctggagcaggggtgggagttcatgcagaagggcatcacaaagctgaagaagatcctggaggggctgccggagccgcagttcagctccgaggactacatgatgctgtacacgactatatacaacatgtgtacccagaaaccgccccatgattactcgcagcagctttatgataagtacagggaggctttcgaggagtacatcagcaccacggttttgccatctttaagggagaagcatgatgaatttatgctgagggaactggttaagagatgggacaaccacaaagttatggtcagatggctttcacgcttttttcattatcttgatcgctactttattgcccggaggtcacttcccgcactcagagaagtcggtctagcttgcttccgtgatctggttttcaatatggttaagggtaaagcgagagatgctgtgatctccttgattgaccgagaacgggaaggggaacagattgatagagctttattgaagaatgtactagatatatttgttgaaattggaatggggagtatggaatgctatgaaaatgactttgaagcagatatgcttaaagatgcatcaacatactattcccggaaggcttcagcttggattttggaggattcatgtccagattacatgctaaaggcagaagaatgcttaaagcgggagaaggatagggtttcacattacttgcatgttagtagtgaaccaaagttgctggagaaagtacaaaatgagttactatcagtatatgcaagccaactgctggaaaaggaacattctggatgccatgtcttacttcgagatgataaggttgacgatctttctagaatgtatcggctgttttctaaaatcaccaagggcttggaacctgtttcacagatatttaaacagcatgttactgctgaaggtactgctctagtcaaacaagcagaggatgtcgccagtaaccggaagatagagaaaagagatgtggctggtctgcaagagcaggtttttgttagaaaggttatagagttgcacgacaagtatatgcagtatgtgaatgactgcttccagaaccacactctcttccataaggctctcaaagaggcttttgaggttttctgcaacaagggtgttgcaggtagttcaagtgcagaactgctggctatgttctgtgacaatatactaaagaaggggggaagtgagaagctaagcgatgaagccattgaggaaacactggagaaggtcgtaaggctgcttgcttatattagcgataaggacctttttgctgagttttacaggaaaaagcttgcacggaggttactgtttgataagagttccaatgatgaacatgagagaagtattttaaccaagctaaagcaacaatgtggagggcagttcacctcaaagatggagggaatggtgactgatttaacactggctagagaacatcaaacaagctttgaggagtatcttaacatgaacccacatgcacatcctggaatcgacctaaccgtcactgtccttactactggattctggccaagttataaatcttttgatctcaaccttcctgtggagatggtaaaatgcgtggaagttttcagggatttctatcagacaaaaacaaaacacagaaagcttacatggatatactcattgggtacctgtaatatcaatggcaagtttgatcataaaaccatggagctggttgtgactacctaccaggctgctacactgctgctattcaatgcctcagataggttgagctattctgagataatgtcacaactaaacttgacagatgatgatgtagtccgattgcttcattccctttcttgcgcgaagtacaaaattctaaataaagaacccaatacgaagtctatttctccaacagactactttgagttcaattccaaattcactgataaaatgagaaggattaagatacctctccctccagttgatgagaaaaggaaggtaattgaagatgtggacaaagatcggagatatgctatagatgcctcaatagtacgcattatgaagagtcgtaaagttttgggacatcaacaattggttatggaatgtgttgagcagcttggccgcatgttcaagcctgacttcaaggcaatcaagaaacggatagaagacttgatttctagggagtatctggagagggacaaggacaaccccaacctatacaaatacttggcctga

SEQ ID NO: 13858 - protein, 744 aa, Lilium longiflorum
MAMHERKTIDLEQGWEFMQKGITKLKKILEGLPEPQFSSEDYMMLYTTIYNMCTQKPPHDYSQQLYDKYREAFEEYISTTVLPSLREKHDEFMLRELVKRWDNHKVMVRWLSRFFHYLDRYFIARRSLPALREVGLACFRDLVFNMVKGKARDAVISLIDREREGEQIDRALLKNVLDIFVEIGMGSMECYENDFEADMLKDASTYYSRKASAWILEDSCPDYMLKAEECLKREKDRVSHYLHVSSEPKLLEKVQNELLSVYASQLLEKEHSGCHVLLRDDKVDDLSRMYRLFSKITKGLEPVSQIFKQHVTAEGTALVKQAEDVASNRKIEKRDVAGLQEQVFVRKVIELHDKYMQYVNDCFQNHTLFHKALKEAFEVFCNKGVAGSSSAELLAMFCDNILKKGGSEKLSDEAIEETLEKVVRLLAYISDKDLFAEFYRKKLARRLLFDKSSNDEHERSILTKLKQQCGGQFTSKMEGMVTDLTLAREHQTSFEEYLNMNPHAHPGIDLTVTVLTTGFWPSYKSFDLNLPVEMVKCVEVFRDFYQTKTKHRKLTWIYSLGTCNINGKFDHKTMELVVTTYQAATLLLFNASDRLSYSEIMSQLNLTDDDVVRLLHSLSCAKYKILNKEPNTKSISPTDYFEFNSKFTDKMRRIKIPLPPVDEKRKVIEDVDKDRRYAIDASIVRIMKSRKVLGHQQLVMECVEQLGRMFKPDFKAIKKRIEDLISREYLERDKDNPNLYKYLA

SEQ ID NO: 13859 - DNA, 2520 bp, Nectria haematococca (strain 77-13-4 / FGSC 9596 / MPVI)
  CDS (1)..(2520)
atgatatccggaagaggcggatctggcgcacgaactgggcggattcgtccccctcgtcgcatcgtgcgtccgaacgaacgcgacgaaggaggcgactttgaggcttgctggaacatgctcaaggaggccctccgtgacatccaccagaagaactgcagtcgactgtccttcgaagaactctatcgcgcagcctacaagattgttcttaagaagaaaggtgaggccttgtatgatcgggtcaaggctttcgaagaacagtggtttgccgaccatgttatccccaagatccgagacctcgtcaccaccagcttgatcaacatcggcgtcgagcgaacatcggtgacgtcggtcaacgagagacgtcaaacgggagaaaagttcctcaagggactacgagacacatgggaggatcacaacatgtcgatgaacatgacggccgatattctcatgtacctcgatcgaggctattcacatctcgaggcacagcgagtacctatcttcgccaccaccatcgccctcttccgagaccatatcctacgttcttgcctgaactccaacaccaaggataccgtcattgatatcctgatatccgtcatcctcgaccagatcgatatggagcgtgagggagatattatcgacagaaacctcgttcgaagctgcagtcgtatgcttagttgtctttacgaaactgaagaggagagcgagaacgacaagttatacctcaccgtattcgagcctcgattcctcgccaacagcaaaacgtattatgccgccgaaggcaagaagcttttacgtgagtcagacgctggtacctggcttcgacacacgcagcagcgactaaacgaggaaattgaccggtgcgggactacgatcgagttggagacgttaccaaaggttacggaaaccatcgaccaggagctcattgtcgcccacatgtccgagttcctcgcgctggaaggaagtggtttgagatggatgatcgacaacgacaagattgacgaactctctatcctttaccgtcttatctcgcgagtcgactccaagaagacggcacttaaggagatcctgcaacaccgtgtggttgagcttggtttggagattgagaagaacctcaagagcaccgacttctcggctggccatggtgaaggcgaggaaggtggcgaaggggacaagtcaaagactctgaaccctgctgcgcagcagacagctgctgctgtcaagtgggtggacgatgtgttgcgtctgaaggacaagtttgatgcgctctgggcacagtgcttccagaacgacttgatcatccagagtgcccttaccaagagcttctccgacttcatcaacatgttttctcggtgctctgaatacgtctcgttgtttatcgatgataacctgaagagaggcatcaagggcaagacggaggctgaggttgatgtcgtccttgaaaaggcaattgttctgattcggtacctgcaggatagggacctgttccagacgtattaccagagacacctggcacgacgacttctccacgcaaagtcggagagccatgacgttgaaaaacaaatcatttctcggatgaagcaagaaatgggccagcagttcactagcaagtttgagggcatgttcagagacctggccacttcctctgatcttagcagtggctaccgagaccacatccgcaacgttggtgacggtgccaaggtcatagatctcaacatcaacgtgctcacgaccaactattggcctcctgaggttatgggtcgaaccgcacagattggtgagggctcccgagtgacgtgcgaatacccacctgaggtgcaacgactgcaggcgagcttcgagcagttttaccttaccaaccgcaacggacgcaagctcacctggattggcacaactggaagcgccgatgtcaagtgtacattcccagctatccctggcaaatctggtccgttggctcgggagcggagatatgagatcaacgtgccaaccttcggtatggttgttctgctactcttcaacgacctggctgagggcgagtctctcagctttgaggagattcaagccaaaaccaacatctcgacccaagatcttatgcgaactctgacggccatcgctgtggcgcccaaatcacgcgtcctggccaaggagcccctgtccaagtcggtgaagcccactgacaagttcaccttcaacgcctccttccagagcaagacgatcagaatcaaggcgcccatcatcaatgcagtatccaaggttgaggatacgagcgagagaaagaagactgaggaaaagaacaaccagacgagagctcacattgtcgacgcggcagttgtgagaatcatgaagtcccgcaaggaactcagccactcacagctcgtcagcgaagttctcactcagctctctggccggttccgacccgaagtgtccctcatcaagaagcgcattgaggatctcatcgcgagagagtacctggagcgacccgacgaggacggcatgccatcactgtaccgttacgtggcctaa

SEQ ID NO: 13860 - protein, 839 aa, Nectria haematococca (strain 77-13-4 / FGSC 9596 / MPVI)
MISGRGGSGARTGRIRPPRRIVRPNERDEGGDFEACWNMLKEALRDIHQKNCSRLSFEELYRAAYKIVLKKKGEALYDRVKAFEEQWFADHVIPKIRDLVTTSLINIGVERTSVTSVNERRQTGEKFLKGLRDTWEDHNMSMNMTADILMYLDRGYSHLEAQRVPIFATTIALFRDHILRSCLNSNTKDTVIDILISVILDQIDMEREGDIIDRNLVRSCSRMLSCLYETEEESENDKLYLTVFEPRFLANSKTYYAAEGKKLLRESDAGTWLRHTQQRLNEEIDRCGTTIELETLPKVTETIDQELIVAHMSEFLALEGSGLRWMIDNDKIDELSILYRLISRVDSKKTALKEILQHRVVELGLEIEKNLKSTDFSAGHGEGEEGGEGDKSKTLNPAAQQTAAAVKWVDDVLRLKDKFDALWAQCFQNDLIIQSALTKSFSDFINMFSRCSEYVSLFIDDNLKRGIKGKTEAEVDVVLEKAIVLIRYLQDRDLFQTYYQRHLARRLLHAKSESHDVEKQIISRMKQEMGQQFTSKFEGMFRDLATSSDLSSGYRDHIRNVGDGAKVIDLNINVLTTNYWPPEVMGRTAQIGEGSRVTCEYPPEVQRLQASFEQFYLTNRNGRKLTWIGTTGSADVKCTFPAIPGKSGPLARERRYEINVPTFGMVVLLLFNDLAEGESLSFEEIQAKTNISTQDLMRTLTAIAVAPKSRVLAKEPLSKSVKPTDKFTFNASFQSKTIRIKAPIINAVSKVEDTSERKKTEEKNNQTRAHIVDAAVVRIMKSRKELSHSQLVSEVLTQLSGRFRPEVSLIKKRIEDLIAREYLERPDEDGMPSLYRYVA

SEQ ID NO: 13861 - DNA, 2295 bp, Aspergillus nidulans FGSC A4
  CDS (1)..(2295)
atggcgcctctaatgccccaggccccccacaaggatgacttggaagaaacatgggtattcctagagaacggcatcaacaatgtcatggtcaaactggaggacggggtggacatgaagaactacatggccctatacacagcggtccacaacttctgcacctctcacaaagctgtcagcggtcaagccatacaagcacagcgtggtgcacacttgctcggagaggagctttatcggaaacttggagaatacttgtcgcgccatcttgagtgggtccacggagaatcgatgggtcatacggatgaagctctactttcattttatattcgggaatggcaaaggtatacgaccgctgccaaatatataaaccatctcttcagatacctgaaccgccactgggtcaagcgagaaatcgatgaagggaaaaagaacgtatatgatgtgtatactcaacacttggtaaagtggaaggaggatttcttcctcaaggtgcatgaaaaggtcatgggcgcggttcttaagcttgtcgaaaagcaacggaatggggagaccattgagcaatcgcggattaagagcattgttgattcatttgtctctctcggacttgatgaaactgaccccacgaagtccacccttgaaatttaccgctattacttccaacggcctttcctcgaagctaccaggatctattatgaggatgagtcgcgtcagtttgtggcggacaacagcgttgtggagtacatgaagaaagcagaaatccgtctcgaagaggagaaagcacgtgttggactctatttgaacaacgatatttcaaaagatctaaccagcacctgtttggatgtacttgtcactgcgcactcggagctcctccgtgacgaattccaaccgctgctcgacaacgaacgtcaagatgatctcgcccggatgtaccggcttttgtcacgaatcaaagatgggctggaccctcttcgcacaaaattcgaagcacacgtaaggagggctggtttgtctgcagttgagaaggttgctgctgaaggtgactccttcgagcccaagatgtacgtcgatgcattgctgtcggtgcacaccagataccacagtctcgtcaaggaagctttcaatggcgagtccgaatttgtccgctcgcttgacaacgcttgtcgcgagtttgtaaatcgcaacaagatctgcaagtccgggtctacgaagacaccagaattactagccaagtacacggattctctgctgaagaggggatcaaaagctgcggaggagtcagagctggaggagatgttggtacagatcatgaccgtcttcaagtacattgaagacaaggatgtcttccaaaaattctactccaagatgcttgctaagcgactagtccatgtgagctcagtatctgatgacgccgagactagcatgatcagcaaactcaaggaggcgtgtggttttgagtacacgaacaagttgcagcggatgttccaggatatccagatttcaaaggatctgaactcaagctacaaggactggcttgagaaatctttcttggatgatgatgaccgaaagaagcttgtggactcgcacttccaaattctcgggaccggtttctggccactcacggccccttcaacttctttccttgctccgcctgaaattgtcaaaacttctgagcgttttcagaagttctattgcgataagcataacggtcgaaagctaacctggctctggcagctgtgtaagggcgagctcaaggccaattacatcaagaacaccaaggtcccatacactttccttgtgtctacgtaccaaatgggcatcctccttctcttcaacgagagcgacacgttgacatactctgatatacaaaaggccactactctcacacctgaaatccttgatccaaacctgagcattttcttaaaggccaaggtccttaacattagtcctgaaggatctaaacccgggccagactcgaccttctccctgaactacaacttcaaaaataagaagatcaaggtcaatctcaacatccaaattaggtccgagcagaaggtcgagacggatgacacacataagacaatcgaggaagaccgcaagctcttgctccagtccgcaatcgtcagaatcatgaaatccaggaagaagatgaagcacgtacagcttgtgcaggaagtaattcaccaggtcaaatcacgcttccccccccaagtacccgacatcaagaagaacatcgaagcattgatggagaaggattacatcgagcgtctggacggcgatgaaatcgcttacattgcatga

SEQ ID NO: 13862 - protein, 764 aa, Aspergillus nidulans FGSC A4
MAPLMPQAPHKDDLEETWVFLENGINNVMVKLEDGVDMKNYMALYTAVHNFCTSHKAVSGQAIQAQRGAHLLGEELYRKLGEYLSRHLEWVHGESMGHTDEALLSFYIREWQRYTTAAKYINHLFRYLNRHWVKREIDEGKKNVYDVYTQHLVKWKEDFFLKVHEKVMGAVLKLVEKQRNGETIEQSRIKSIVDSFVSLGLDETDPTKSTLEIYRYYFQRPFLEATRIYYEDESRQFVADNSVVEYMKKAEIRLEEEKARVGLYLNNDISKDLTSTCLDVLVTAHSELLRDEFQPLLDNERQDDLARMYRLLSRIKDGLDPLRTKFEAHVRRAGLSAVEKVAAEGDSFEPKMYVDALLSVHTRYHSLVKEAFNGESEFVRSLDNACREFVNRNKICKSGSTKTPELLAKYTDSLLKRGSKAAEESELEEMLVQIMTVFKYIEDKDVFQKFYSKMLAKRLVHVSSVSDDAETSMISKLKEACGFEYTNKLQRMFQDIQISKDLNSSYKDWLEKSFLDDDDRKKLVDSHFQILGTGFWPLTAPSTSFLAPPEIVKTSERFQKFYCDKHNGRKLTWLWQLCKGELKANYIKNTKVPYTFLVSTYQMGILLLFNESDTLTYSDIQKATTLTPEILDPNLSIFLKAKVLNISPEGSKPGPDSTFSLNYNFKNKKIKVNLNIQIRSEQKVETDDTHKTIEEDRKLLLQSAIVRIMKSRKKMKHVQLVQEVIHQVKSRFPPQVPDIKKNIEALMEKDYIERLDGDEIAYIA

SEQ ID NO: 13863 - DNA, 2334 bp, Verticillium albo-atrum (strain VaMs.102)
  CDS (1)..(2334)
atgacgactatgtctaacaagacgaaggggaagctgcctgaagtgattgaccttacacagcagagtgccttccggccatactcgggcgccaaaaagatcgtgatcaagaatctcaggccacccacgcagaccgacaagaccgagcagtattatgatcggacacggcagcagctcaaggatgcccttcagtgcatacttcgccaccagcctctccaactgccaatggagaagctgtacaggggcgcggaggatatctgtaggcatgagcaggggcaggaactatatcggatgctacaagagctatgcgaagctcacttgaagcaagcaaccttgcgatccatcatcgacaggtcgccaggcccctcaaatattgacatgttgcggagcgtctttctccactggcaggattggaacaaggcagttatagacattcggtctatattcagctacctcgacaggacgtatcttcttcgggagagaacgctgggctcaatcaacgacttgacaatcacgcagttccggaagatgctctcgtcttcggccagcaaggacgctaccaaccagacaccttttactcgatgtctccgcggggtgtgcgagctgatcgcttacgatcgagtgaatgacgatcgattcgatgctcgattactgaaagaatcagtccgtatgttcaacgtgcttaacgtctaccaaaagtcgtttgagccggcctttctccacgactcagtcaacttcttccacgaatttgcagatgagaggagcacagcaactctgaaggagtacatccttgcatgcgagaagcttttgaaggatgaggactaccgatgtaacgcgtacaaccttgacagcacgaccaagaagcaacttctcgatgccgcccacggcatcgtggtgaaggattactcggctaagcttctggatgtcgaaagcttgtcgaagctgcttgctgatcacgaaatcgagtcgatgcgagctctctacgacctcctgcggttgtcggggatccaggcgaagctgaaggacccgtggaaaacctacatccaagaggctggagcagcgattgtgggcaacgtagagagaggagacgacatggtcatgaggttgcttgagctgaggcgagctctggatttggtcgtgcgagatggcttcagaggtgatgaagtctttgggtacgagctgaggcatgccttcggcgctttcatgaacgaccggaaaacgacttcggggtggagcacgggaacgtccaagattggagagatgatcgcgaaacacatcgacatgctcttgcgaggcggtctcaaggctcttcccaagagtctgttgtctgacaacaaggatcgggctgctgctgaaaaaaagcgggcaatcaagttcattgaagggaaggacgcctttgaagctttttacaagaaagatctgcccaggcggctgctcatgggccgaagtgcgagcgaagatgccgagagaaatatgcttcgaaagctccgggatgagtgcggtgccaactttacgcgtaatcttgagcagatgttcaaagatcaggagctcgccaaggaggagatgcagcactacaagcaatggtcagaaggcacaaatgctgaacaacaagtcgatctgcaagttatggtcatctccgcagcgtcttggccgacatatcccgacacgaagctcaacctgcctgaaggtgcagcggccgagatcgaacgattcgagcggtggtacaaccacaagcatgacggcaggaaactctcgtggccccattcgctcgctaattgtacggtcaaggccatcttcccgagaggcacgaaagaactcatggtcagtgcgttccaggccgttgtgcttgtgctgttcaacgaggtcgatcttgagggcttcctcagcttcggacagatcagcacagctacgggacttgcgggtccggaactccagcggacactacaatcgctcgcatgtggcaaggtccgagttttgagcaaacaccccaagggaagggatgtcagcgagaccgatacttttaccatcaacaaagctttcactgatcccaaacttcggatcaagatcaatcagattcagctcaaggagacgaaggaggagaataaagcgacacatgagcgcattgccgaggaccgtaaattcgagacgcaggcggccattgtgcgggtgatgaaggcgcgcaagacgatcggacacagcgagctggtggctgaagtgatcaactttactcgcaagcgtggtcccgttgacgccgcctccatcaagaagctcatagagacgttgattgacaaggactacatggagcgcgacggaaacatgtatacctacatctcatga

SEQ ID NO: 13864 - protein, 777 aa, Verticillium albo-atrum (strain VaMs.102)
MTTMSNKTKGKLPEVIDLTQQSAFRPYSGAKKIVIKNLRPPTQTDKTEQYYDRTRQQLKDALQCILRHQPLQLPMEKLYRGAEDICRHEQGQELYRMLQELCEAHLKQATLRSIIDRSPGPSNIDMLRSVFLHWQDWNKAVIDIRSIFSYLDRTYLLRERTLGSINDLTITQFRKMLSSSASKDATNQTPFTRCLRGVCELIAYDRVNDDRFDARLLKESVRMFNVLNVYQKSFEPAFLHDSVNFFHEFADERSTATLKEYILACEKLLKDEDYRCNAYNLDSTTKKQLLDAAHGIVVKDYSAKLLDVESLSKLLADHEIESMRALYDLLRLSGIQAKLKDPWKTYIQEAGAAIVGNVERGDDMVMRLLELRRALDLVVRDGFRGDEVFGYELRHAFGAFMNDRKTTSGWSTGTSKIGEMIAKHIDMLLRGGLKALPKSLLSDNKDRAAAEKKRAIKFIEGKDAFEAFYKKDLPRRLLMGRSASEDAERNMLRKLRDECGANFTRNLEQMFKDQELAKEEMQHYKQWSEGTNAEQQVDLQVMVISAASWPTYPDTKLNLPEGAAAEIERFERWYNHKHDGRKLSWPHSLANCTVKAIFPRGTKELMVSAFQAVVLVLFNEVDLEGFLSFGQISTATGLAGPELQRTLQSLACGKVRVLSKHPKGRDVSETDTFTINKAFTDPKLRIKINQIQLKETKEENKATHERIAEDRKFETQAAIVRVMKARKTIGHSELVAEVINFTRKRGPVDAASIKKLIETLIDKDYMERDGNMYTYIS

SEQ ID NO: 13865 - DNA, 2517 bp, Sordaria macrospora
  CDS (1)..(2517)
atggcgtcaagaaccaacaagatccggccaattaggaagccgatcatgaatcgggaccagggcgagttcgagccatgctgggcactcctgcgcgacgccatgaccgatattcacctacagaacgccggccgtctgtccttcgaacaactataccgagcctcgtacaagattgtccttcgaaagaagggcgccctgctctacgagagggtcagggattttgagcaggagtggttccgagaccacatcatgcccaacatcgccgccctgatcacaaagaatctgatcaacatatcgctgcttcagcacccggggtcgagctcacatgagcgcagggagatgggcgagaagttcctccgcggaatacgagacacatggacggatcacaacaggtcaatgaacatgattgcggacgtgctcatgtatctcgaccgtgtctataccctcgagacaaagcagccttctctgtttgccgttaccattgggctgtttagagacaatgtccttcaaagccacgctggtaccgccgcagacgacatcgagcaagacttcgtcatctttgatatcctttgcgccgtcatattgggcctgatcaacatggagcgcgacggcgacatcatcaaccgaaaccttgtgcgcaagatcaccacgatgctcgagagcttatacgagaccgacgacgaaattgagaaccagcggctttacctcacccttttcgaaccacgctatctcgaggcaagcacagagttctatcgcaaagagtgcgagaagctggttcaagaagcaaattgcagcacatggctccgccatgcccaacggcgactaaacgaggaacgagagcgatgtggcactgctgtatcgattatgacgaccgacaagattgcgagtgtggtggagaaagagctcatcgaagcaaagctcgatgtgttcctggccatggaaggtagcggcctgaagcctatgatcgacaatgatcgattggaagacctctcgatcttgtaccaacttatatccagggtggacagcacgaaatcggcgctgaaggtcattctacaacgtagagtacgggagcttgggcaggaaatcgaaaaggcccttaagaacaccgacttctccgtcgctggcgcagctgctggggatggtgaggatgctggagaaggagcagagaagaccaaagcccagaccttgaatccggctcagcagcagactgcagccgctatcaagtgggttgatgacgttttgcagctcaaggacaaattcgacagaatcctgtccgactgtttctgcgatgacctcctgctacaatccgcgattacacgaagcttcgctgatttcatcaactcgttcaaccgcagttcggaatatgtctcgctgtttattgacgacaacctcaaacgtggcatcaagacaaagacggaagcggaagtagacgctgttttagacaaggccattgtccttctcaggtatctttcggaccgagacatgttcgagaggtattaccagaagcatctggccaagcggttactgcatgggaagtctgagatccataccgagaaggagatggtatcccgtatgaagtccgaaatgggcaaccatttcacatccaagtttgaaggcatgttcaaggacatggagttgtccaaggatctaaccgacaactaccgcgatcatatcgccaatctaggtgatgccgataataggaagattgacctcaacatcaacgtcttgacgaccaacaactggccacccgaggttatgggcggtggcaaatcgaaggatgaagggcaaaaaacggaatgcttctacccacctgaaattaagcgcctccaggagagtttctacaagtactacctcaaggacaggagcgggcgtgtcctcacatgggttagctcggcgggcaatgcggacgtcaagtgtgtgttccccaaggtccccggcaaggagaccggaccattgagcaaggagaggcgatatgagctgaacgtctcgacatatggcatgattgtgcttttgctttttaacgatctcgcggacggcgaaagtttgagctttgacgagatccaagctaagacgaacattccggcaccagagcttatgcgaactctggcttcactttcgagtgttcccaaatgcagagtcttgctcaaggaaccggccaccaagaacgtgaagaacaccgataagttcttctacaacgcacagtttgcgagtaaggctatcaggatcaaggctcccgtcatcagcagcatttcaaaggtcgaaggggacgaggagagaaaggagacggaaaggaagaatgatcagacgcgtgctcatgttattgatgcggcgattgtcagaatcatgaagcaacgcaagcaactggctcatacccagctcgttaacgaggtcatctcgcaacttatgggccgcttcaagcctgacgtaccgctaatcaagaaacgaattgaggatcttctcgcgagagagtatctggagcgggtagaaggagactcgtcgacgtaccgatacttggcttag

SEQ ID NO: 13866 - protein, 838 aa, Sordaria macrospora
MASRTNKIRPIRKPIMNRDQGEFEPCWALLRDAMTDIHLQNAGRLSFEQLYRASYKIVLRKKGALLYERVRDFEQEWFRDHIMPNIAALITKNLINISLLQHPGSSSHERREMGEKFLRGIRDTWTDHNRSMNMIADVLMYLDRVYTLETKQPSLFAVTIGLFRDNVLQSHAGTAADDIEQDFVIFDILCAVILGLINMERDGDIINRNLVRKITTMLESLYETDDEIENQRLYLTLFEPRYLEASTEFYRKECEKLVQEANCSTWLRHAQRRLNEERERCGTAVSIMTTDKIASVVEKELIEAKLDVFLAMEGSGLKPMIDNDRLEDLSILYQLISRVDSTKSALKVILQRRVRELGQEIEKALKNTDFSVAGAAAGDGEDAGEGAEKTKAQTLNPAQQQTAAAIKWVDDVLQLKDKFDRILSDCFCDDLLLQSAITRSFADFINSFNRSSEYVSLFIDDNLKRGIKTKTEAEVDAVLDKAIVLLRYLSDRDMFERYYQKHLAKRLLHGKSEIHTEKEMVSRMKSEMGNHFTSKFEGMFKDMELSKDLTDNYRDHIANLGDADNRKIDLNINVLTTNNWPPEVMGGGKSKDEGQKTECFYPPEIKRLQESFYKYYLKDRSGRVLTWVSSAGNADVKCVFPKVPGKETGPLSKERRYELNVSTYGMIVLLLFNDLADGESLSFDEIQAKTNIPAPELMRTLASLSSVPKCRVLLKEPATKNVKNTDKFFYNAQFASKAIRIKAPVISSISKVEGDEERKETERKNDQTRAHVIDAAIVRIMKQRKQLAHTQLVNEVISQLMGRFKPDVPLIKKRIEDLLAREYLERVEGDSSTYRYLA

SEQ ID NO: 13867 - DNA, 2331 bp, Sordaria macrospora
  CDS (1)..(2331)
atggctccggcaaccatgatgatggggatgtacgggcagcaggcttctggcagtgatggtatcgacagcacttggccatacttgcagtccagcatcaacaagatcatgaccaacctccaagaaggtctcgacatgactagttacatgggaatctacacggcggttcacaacttctgcacatctcagaaggctagcggcggtatgagcagtcagagtagtcaccttccaggaatcggggctcagaggggcgcgcatctgcttggcgaggacctctacaagaagctggcgaattacttaaccgaccatctccagggcctggtctccgaagccgaggctcacaaggacgaggccttgttggccttctacattcgcgaatggcaacgctacaccaacgcggccaagtacatccaccatctcttcaagtacctaaaccgacactgggttaagcgcgagatggacgaaggaaagaagaacatctacgacgtctacaccctccaccttgtccaatggcgggacgtgttgttccaagctgtctgcaagaaagtcatggacgccgtcctcaaactggtggaaaggcaacgcctcggtgaaaccatcgagtacacccagatcaagcaggtggtcgatagcttcgtctcgctcggcatggatgagggcgacaatagcaagactacgctggaagtgtaccgatatcacttcgaaaagccgttcctggaagcgaccaagatcttctaccaaaacgagagcaaacagtttgttgctgagaacagcgtggtcgagtacatgaagaaggccgaggctcgcctggccgaggaggaggagcgcgtacgcatgtacctccaccccgacattgcggtccatctgaagaaggcctgtaaccaggccctcatcgccgaacactccaacattttgcgtgacgagttccaggtactgttggataacaaccgagaggatgacatgcgccgcatgtatagccttttgtctcgtattcccgacggtcttgagcctctcagggctcggttcgaggctcatgttcgcaaggctggtttggcggctgtcgccaaggtggctgcagacgccgacaagctagagcccaaggtttacgttgacgctctgctggagattcacactcagtaccaggggctggttgagcgcgccttcaacaaagagcccgatttcacaagatccttggacaatgcctgcaaggaattcgtgaacaggaacgaggtctgcaaatcgggctccaacaagtcaccggaattgcttgccaagtacaccgatgtgcttctccgcaagagcagcaccggcgtggaggaggtggagctcgagaacactttgacacagattatgaccgtgttcaagtacattcaggacaaggatgtgttccagaagttctactcacgtatgctggcacgccgcctcgtacacagcaactccaactcggacgacgccgagacgtccatgatctccaagctcaaggaagcatgcggcttcgagtacacgaacaagttgcagcgcatgttccaggacatgcagatcagcaaggacctgaacacaggcttcaaggaacacgtcgcatctcttaatttggaagagaagccgcttgactcgtcatacgccatcctcggaaccggcttctggccgctcaccgctccgagcaccccctttactgcgccttctgagatccaggccgacatcgaacggttcgcccgcttctacaagaacaagcacgagggccgcaagctcacgtggctttggcagctgtgcaagggcgacatcaaggccaactatatgaagggtgccaagatgccgtatatcttgacagtgtcggcctaccagatggccatcctgctgctcttcaacgagcaggacaagcacacgtacgaggatattctggaaatcaccaagctcaacgcggacgtagtagatggcgccttgggcatcttggtcaaggccaagttgcttaccgttgagggtggcgagggcggaaagcctggcccaggatcgacgctttcgctcaattacgacttcaagaacaagaagtatcggattaacctgaacgtgggcatgaagagcgagacgaagcaggaggaggtggagacgaacaagacgattgaggaggatcgcaagttgttgttgcagtccgccatcgtccgtattatgaaggcccgcaagaagatgaagcaccaacagctggtttcagagactattaatcagattagggcccgatttatgcctaagattggcgacatcaagaagtgcatcgaaatcttgctcgataaggagtacctggagcggttggaggatgatgagcttgggtatcttgcttaa

SEQ ID NO: 13868 - protein, 776 aa, Sordaria macrospora
MAPATMMMGMYGQQASGSDGIDSTWPYLQSSINKIMTNLQEGLDMTSYMGIYTAVHNFCTSQKASGGMSSQSSHLPGIGAQRGAHLLGEDLYKKLANYLTDHLQGLVSEAEAHKDEALLAFYIREWQRYTNAAKYIHHLFKYLNRHWVKREMDEGKKNIYDVYTLHLVQWRDVLFQAVCKKVMDAVLKLVERQRLGETIEYTQIKQVVDSFVSLGMDEGDNSKTTLEVYRYHFEKPFLEATKIFYQNESKQFVAENSVVEYMKKAEARLAEEEERVRMYLHPDIAVHLKKACNQALIAEHSNILRDEFQVLLDNNREDDMRRMYSLLSRIPDGLEPLRARFEAHVRKAGLAAVAKVAADADKLEPKVYVDALLEIHTQYQGLVERAFNKEPDFTRSLDNACKEFVNRNEVCKSGSNKSPELLAKYTDVLLRKSSTGVEEVELENTLTQIMTVFKYIQDKDVFQKFYSRMLARRLVHSNSNSDDAETSMISKLKEACGFEYTNKLQRMFQDMQISKDLNTGFKEHVASLNLEEKPLDSSYAILGTGFWPLTAPSTPFTAPSEIQADIERFARFYKNKHEGRKLTWLWQLCKGDIKANYMKGAKMPYILTVSAYQMAILLLFNEQDKHTYEDILEITKLNADVVDGALGILVKAKLLTVEGGEGGKPGPGSTLSLNYDFKNKKYRINLNVGMKSETKQEEVETNKTIEEDRKLLLQSAIVRIMKARKKMKHQQLVSETINQIRARFMPKIGDIKKCIEILLDKEYLERLEDDELGYLA

SEQ ID NO: 13869 - DNA, 2439 bp, Ostreococcus tauri
  CDS (1)..(2439)
atgacggatcgtcgacccgtggcgctggaggagggatggggacggatgcaggatggtatcatgaaactgagacgtatccttgacacggacgacgccgagccgtttacgtcggaggagtacatgaacctgtacacgtacgtctcgaaatcggcagggagacccgaaatccatgacacgagtgatgacgatataccatacagtgattcacacttcagtctgaacactcttgtggactacttttcagccttgtctgacgcgtcgtcgggtttctggttacaactccggagcgccgcgcttcgcgtgacttcatcgtttaatttgtgcactcgtagtaccatttacaacatgtgcacgcaaaaggcgccgtacgacttctcagagcagttgtacgagcgttacgaggcggcctttaaccagtacatcaatgcaaaggttttgccaacgctcgtggaaaagaagggtgagtacatgctgaagagtctggtgatgcgatgggagaaccacaagataatggttcgatggctgtcgaagtttttcaactatctcgaccgatactacgttcagcgtcatcatttccctcccctcaaggatgtcggggtgaattgctttcgtcggctcgtgtacgacgagatcaagttgagcgtgaagacggcggtgctcgagctcatcgacaaggagcgggagggagaaaagacggacaggacgttgattaagaatattacgtcgatttttgtcgaaatgggtttggggacgatggacgcgtaccaaaatgatttcgaagcggatttgttggcacacactgcgtctttctattcgcgcaaggctttgcagtggatcgcagaggactcctgtccggcttaccttatcaaggcggaagagtgtctgaacagcgagcgcgagcgagtgcagctttacttgcatcaaactaccgaatccaagctgatttcgaaggtggagcaacaactgctcgagcagtatgaaaatgagttactggagaaggagaatagcggatgtgcggcactcttagtcgaagacaaaacggaagatttggctcgcatgtaccgcctcttccgtgctgtaccaagcggcttgaagccgatagctgaaattttcaaggctcacgtgaagaaggatggaatgaacttagtgagcgtcgccgagcagacggcgtcaaacatgaagagcaagaagccggacaaggacgcggcatccacatccgtggagcaggtattcactcgcagtgcgatcgaactatacgacaagtacagcacgtacgtaaacgaatgtttcgacagcagtgctttattcaatcgtgctttgacggaggctttcgagaacttctgcaacaagggaatcgccgggaactccaccgcgcagcttctggccgatttctcggacaaactgttgcgtaagggtgggagtgagaagctgagcgatgaaaagatggaggaaaccttagaaaaggtcgtcaaactcttggcttttattagcgataaggacatgtttggagagttctaccgcaaaaagctcgccagacgtctgttgacggacagctcagcgagtcaggattacgagcgttcaattttgagcaaactcaagacacagtgcggagcgcaattcactggtaaaatggaaggaatgttaaacgatttgcaatccgcgcgggagacgcaagatacctttgaacggtggatggaggaggatgcggcgaaccgtaagccccctctcgatttctcagtcaccatcttgactcacggcttctggccccagcacaaacccgtggagttccagctgaacgatgagttggcgaagtgcgtggacaccttcagaagcttctatgataaacgcatgggacagcgtaaattgacgtggatccatcatctcggaacggctaccgtggttggtaagtttgagaccaagtccattgagatgctcatgcaaaccactcagtgcgcagttttgctactcttcggagccaagacggagctgacgatgcagaacgtgatcgatttgacaaaattaccccccgacgacgccaaacgcgctctgtactctctatcttgtgcgaagtacaaaattctgaacaagtctccagagggcaagacaatcggaccggatgacgtcttcgcgttcaatgaaaagttcacggatagatcgagacgcattaaaataggactaccgcccgtagacgagaagaaggtcactatcgagcacgtcgagcacgatcggcgccacgcgatcgatgcggcaatcgttcgaacgatgaaggcgagaaaatctctggcgtacaaccaactcatcattgaagtcgtgtctcaactcaaacagaagttcgttcctgagccgaaacaaatcaagattcgagtcgaagagctcattaacaaggagttcatcgagcgcgacaaggagaatccacaggttttcaaatacatggcataa

SEQ ID NO: 13870 - protein, 812 aa, Ostreococcus tauri
MTDRRPVALEEGWGRMQDGIMKLRRILDTDDAEPFTSEEYMNLYTYVSKSAGRPEIHDTSDDDIPYSDSHFSLNTLVDYFSALSDASSGFWLQLRSAALRVTSSFNLCTRSTIYNMCTQKAPYDFSEQLYERYEAAFNQYINAKVLPTLVEKKGEYMLKSLVMRWENHKIMVRWLSKFFNYLDRYYVQRHHFPPLKDVGVNCFRRLVYDEIKLSVKTAVLELIDKEREGEKTDRTLIKNITSIFVEMGLGTMDAYQNDFEADLLAHTASFYSRKALQWIAEDSCPAYLIKAEECLNSERERVQLYLHQTTESKLISKVEQQLLEQYENELLEKENSGCAALLVEDKTEDLARMYRLFRAVPSGLKPIAEIFKAHVKKDGMNLVSVAEQTASNMKSKKPDKDAASTSVEQVFTRSAIELYDKYSTYVNECFDSSALFNRALTEAFENFCNKGIAGNSTAQLLADFSDKLLRKGGSEKLSDEKMEETLEKVVKLLAFISDKDMFGEFYRKKLARRLLTDSSASQDYERSILSKLKTQCGAQFTGKMEGMLNDLQSARETQDTFERWMEEDAANRKPPLDFSVTILTHGFWPQHKPVEFQLNDELAKCVDTFRSFYDKRMGQRKLTWIHHLGTATVVGKFETKSIEMLMQTTQCAVLLLFGAKTELTMQNVIDLTKLPPDDAKRALYSLSCAKYKILNKSPEGKTIGPDDVFAFNEKFTDRSRRIKIGLPPVDEKKVTIEHVEHDRRHAIDAAIVRTMKARKSLAYNQLIIEVVSQLKQKFVPEPKQIKIRVEELINKEFIERDKENPQVFKYMA

SEQ ID NO: 13871 - DNA, 2244 bp, Ostreococcus tauri
  CDS (1)..(2244)
atgtcgtcgagccggcgcggtgatcactcgcgctcggcgacgggcgaaccgtcgacgcgatcgaacgacgggcgacgaagcgcgcacggtgcgcccgggaccgcgcgcgggctgacgataaaaccattcaagcgcgcgccgacggtgccgacggagttcgcgacgcgggcgcgggagacgctgcgagaggcgatacgacgggtgcaggcgaaggaggtgacgggggtgagtcacgaggctttgtatcgacacgtggagaatctgtgcgtgcacagacgggcggcggaggcgttcgaggattttcagtcgggggcggatcgacgggcgagagaggtcttgcggggattggagggacggaaaattgaggattcaggggttttcttgacgaaattcgatgagacgtggggggattattgcgcccaggcgttgacgctgcggtcaatctttttgtatctcgaccgcgcgcaggcgaacggaggcgggaaatcgtcgacgctctgggacgtgtcgctgcgcgttttccacgagcatctcgagggaacggcgaagagcgtgaagggtaaggttgtcaggggcttactcgatctcgtcgagcgagagcggatgggggagaagattgatagggcgctcgcgaagcgcgttttgcgagcgctgagcgcgctcggggtgtatcaagaggcgtttgaaaacgtcttcatagaggcgagtcaggagttctatcgcaaggaagggaacgagtactcggtacagacggacgtgtcggattacctgaagcactgcgaacggaggctcgaggaggaggcggagaggcgctcatgcggacgtgcgagccaaggtttgatagaggcacacatcggagacatcttagacaaggggttcgtcgatctcatgcgtcagcatcgactggaggatttgcggcgcctgcactcgcttctcgctcgaatggatggtttggcccgtctgtgcagcgcgttcgtgacgtacctcaagcagcagggcacggctattgtgaaagacgaggcgcgcgataaggacatggtggatcgattactgacgatgaagaccgccgtggacgaggtcgtgagcaaatctttcggtcgaaccatcgcggacggatccaatgacattttcatcaacggtgtcaaggagtcgttcgagtcattcatcaactgtcgacaaaatgtccctgcggagctgatcgcaaaatacattgattcaaagctgaaaagcgggagtaaaggactgagtgaagaggagttggagagaactttagataaggcgctaacattgttcagatacatcgtcggaaaggatgttttcgaagtgttttacaagaaggagctctcgaagcgtcttttgcacggcaagagcgcgagcatcgacgcggagaggagcatgatccaaaagttgaaggcggagtgtggcagtcagttcacgcaacatctggaaggaatgttcaaggatatcgatctgagtcgcgaaatcatgcaatcgtttcgacagacgttcgagaacgacccaatcatagagatgaatgtcaatgtcataactgcggggtgctggccgtcgtacccatcagtcgacgtcaagctcccagaggagctggcgaatttgcaagagaagttcatgagtttctacctcggtaaacattcagggcgaaagttaacgtggcaaaactcggagggtcactgcgtcctcaaggcgcgcttcgacggaggaatgaaggaactcagtgtctccctctttcagtgcgtcatcctgatgctgttcaacgactccaagaagctctcgtacacggagattgcgcagaagactgggatggaagagaaggaacttaaacgtgctcttcagtcactggcttgcgccaaggttcgaatcctgaacaaggagccaaaatcgcgcgagatcaacgacgatgattctttcgaggtgaacactgcgctgaacgagcgtctgttccgcatcaaggtcaactccatccaagtcaaggaaacggccgaggagaacaagcagaccatggagcgggtgttccaagatcgccaacaacagatagacgccgctatcgttcgcgtgatgaagacgaggaagtcgctcacgcatgcgctcctcatctctgaactcatggcgcagctcaagtttcccaccaaggcgagcgatttgaagaagcgtatcgagagtctcatcgagcgagagtacctcgagcgcgaccgcgaagatgcgcagacgtataactacctcgcttaa

SEQ ID NO: 13872 - protein, 747 aa, Ostreococcus tauri
MSSSRRGDHSRSATGEPSTRSNDGRRSAHGAPGTARGLTIKPFKRAPTVPTEFATRARETLREAIRRVQAKEVTGVSHEALYRHVENLCVHRRAAEAFEDFQSGADRRAREVLRGLEGRKIEDSGVFLTKFDETWGDYCAQALTLRSIFLYLDRAQANGGGKSSTLWDVSLRVFHEHLEGTAKSVKGKVVRGLLDLVERERMGEKIDRALAKRVLRALSALGVYQEAFENVFIEASQEFYRKEGNEYSVQTDVSDYLKHCERRLEEEAERRSCGRASQGLIEAHIGDILDKGFVDLMRQHRLEDLRRLHSLLARMDGLARLCSAFVTYLKQQGTAIVKDEARDKDMVDRLLTMKTAVDEVVSKSFGRTIADGSNDIFINGVKESFESFINCRQNVPAELIAKYIDSKLKSGSKGLSEEELERTLDKALTLFRYIVGKDVFEVFYKKELSKRLLHGKSASIDAERSMIQKLKAECGSQFTQHLEGMFKDIDLSREIMQSFRQTFENDPIIEMNVNVITAGCWPSYPSVDVKLPEELANLQEKFMSFYLGKHSGRKLTWQNSEGHCVLKARFDGGMKELSVSLFQCVILMLFNDSKKLSYTEIAQKTGMEEKELKRALQSLACAKVRILNKEPKSREINDDDSFEVNTALNERLFRIKVNSIQVKETAEENKQTMERVFQDRQQQIDAAIVRVMKTRKSLTHALLISELMAQLKFPTKASDLKKRIESLIEREYLERDREDAQTYNYLA

SEQ ID NO: 13873 - DNA, 2199 bp, Arabidopsis thaliana
  CDS (1)..(2199)
atgagtaatcagaagaagaggaattttcagatagaggcgtttaagcatcgagtcgttgtggatcccaaatacgctgataaaacttggcagattcttgagcgtgcgatccatcagatttacaatcaagatgctagcggtctcagtttcgaagaactttacagaaatgcgtacaacatggtcctgcacaagtttggtgagaagctatatactgggtttattgctactatgacttctcatctcaaagaaaaatccaagcttatcgaggcagctcagggagggtcgtttctagaagagcttaataagaaatggaatgagcacaacaaagcgttagagatgattcgagacattctcatgtatatggataggacttatattgagagcaccaaaaagactcatgttcatccgatggggcttaacttgtggagggataatgttgtgcatttcactaagatacatacaaggcttctaaacactcttcttgatctagtgcagaaggaacggataggtgaagttattgatagggggttgatgaggaatgtcattaagatgtttatggatttgggtgaatctgtgtatcaggaggattttgagaagccgtttttggatgcgtcttctgagttttataaggttgagtctcaggagtttattgaatcttgtgattgtggggactatctgaagaaatcagagaaacgccttactgaagagatagagagggtagcgcactacttagatgccaagagcgaagagaagattactagtgtggttgagaaagagatgattgccaaccacatgcagagactggttcacatggagaactcaggtctggttaatatgcttctgaatgacaagtatgaggatttgggtagaatgtacaacttgtttcgcagggttactaatggtcttgttactgtcagagacgttatgacttcgcatcttagggagatgggaaaacaactggttactgatccggaaaagtcaaaggatccggtggaatttgtacaacgtctattggatgagcgggataaatatgacaaaatcatcaacaccgcatttggcaatgataaaacctttcagaatgccctgaattcttcattcgagtatttcatcaacttgaatgctcgttctcctgagtttatctccctgtttgttgatgacaagctacggaaaggacttaagggtatcaccgatgtggatgttgaggttatccttgataaagtgatgatgctgttccgttatttacaagagaaagatgtctttgagaagtactacaagcagcatttggctaaaaggcttctctcaggcaaaactgtgtcagatgacgcagaaaggagtttaatagtgaaactaaagacagaatgtggctatcagttcatttcaaaattggaaggcatgttcactgacatgaagacttcagaggacacaatgcgtgggttttatggcagtcaccccgagctttcagaaggacctacacttattgttcaggtacttacaactggttcttggccaacacagcctgcagtaccttgtaatctcccagctgaagtttcagttctctgtgagaagttccgttcttactaccttgggacacataccggtagaagattgtcctggcaaacaaacatgggcacagcagatatcaaagccatctttggaaagggtcagaaacatgaactgaacgtgtcgactttccagatgtgtgttctcatgttgttcaacaattctgatcgactcagctacaaagagatcgaacaggctacagaaatcccggcagcagatcttaaacgctgtttgcagtcgctagcttgtgtaaagggcaaaaacgtgataaagaaagaacccatgagcaaagacataggagaggaggatttgttcgttgtgaacgacaagttcactagcaagttttacaaagtgaagatcggaactgtggttgcccaaaaggaaacagaaccggagaagcaagagacgagacagagagtggaggaagacagaaaacctcagattgaagcagccatcgtaaggatcatgaagtccaggaaaatactagaccacaacaacataatcgccgaggtgacgaaacagttgcagccacggttcctagctaatcccacggagataaagaagagaatcgagtcgctcattgaacgagatttcttggaaagggatagtacagaccggaaactttaccgctatctagcctaa

SEQ ID NO: 13874 - protein, 732 aa, Arabidopsis thaliana
MSNQKKRNFQIEAFKHRVVVDPKYADKTWQILERAIHQIYNQDASGLSFEELYRNAYNMVLHKFGEKLYTGFIATMTSHLKEKSKLIEAAQGGSFLEELNKKWNEHNKALEMIRDILMYMDRTYIESTKKTHVHPMGLNLWRDNVVHFTKIHTRLLNTLLDLVQKERIGEVIDRGLMRNVIKMFMDLGESVYQEDFEKPFLDASSEFYKVESQEFIESCDCGDYLKKSEKRLTEEIERVAHYLDAKSEEKITSVVEKEMIANHMQRLVHMENSGLVNMLLNDKYEDLGRMYNLFRRVTNGLVTVRDVMTSHLREMGKQLVTDPEKSKDPVEFVQRLLDERDKYDKIINTAFGNDKTFQNALNSSFEYFINLNARSPEFISLFVDDKLRKGLKGITDVDVEVILDKVMMLFRYLQEKDVFEKYYKQHLAKRLLSGKTVSDDAERSLIVKLKTECGYQFISKLEGMFTDMKTSEDTMRGFYGSHPELSEGPTLIVQVLTTGSWPTQPAVPCNLPAEVSVLCEKFRSYYLGTHTGRRLSWQTNMGTADIKAIFGKGQKHELNVSTFQMCVLMLFNNSDRLSYKEIEQATEIPAADLKRCLQSLACVKGKNVIKKEPMSKDIGEEDLFVVNDKFTSKFYKVKIGTVVAQKETEPEKQETRQRVEEDRKPQIEAAIVRIMKSRKILDHNNIIAEVTKQLQPRFLANPTEIKKRIESLIERDFLERDSTDRKLYRYLA

SEQ ID NO: 13875 - DNA, 2511 bp, Oryza sativa subsp. japonica
  CDS (1)..(2511)
atgtctcacccccacgccaccgcccccaagcgccccggccacttctcctcctcctccgccgccgcctcctccccgacctcccccgcgcagccgcacatgaagaaggccaagttccccggctcctcctcctcctcctcctccgccgccgcccccggggtcaccgagaagaacgggctccacgtcgatcccacggccgccgccgcccggaccggtgggcgcaccaacggcgaggaggatgcggagatggtgctcgccgaccaggaggagctcgccgctccgagcgcatcggccccggcgggggtcgccgccaacctcttccggaagaaggccacactcccccagccatccgccgcccgcaagcccctccgaatcaaaataggtcagccaaaattgccaacaaactttgaggaggatacatgggctattttgaaagatgctattacagctatatttctaaaacagaaactttcgtgcgatgttgaaaaactttaccaggctgcaggtgacctttgtctacacaagctaggcgcaaatctatacgaacgcataaagaaagaatgtgaagtacacatatcggcaaaaatatcagcattagtgggtcaaagtccagatttagtagtatttttgtctctggtgcaaagaacatggcaagatttttgcgatcagatgttgattattcgtggtattgctttacttcttgatgtaaaatatgtcaagaatgttgcaaacatttgttcagtgtgggacatggggttgaagctattccgcaagcatctttcactgtctccggagattgaacacaaaactgttactggtcttctaagattaattgagagtgagaggcttggtgaagcaatagacaggacattacttagtcatcttctgaagatgtttactgctcttggaatgtattctgagagttttgaaaagccctttctggagtgtacatctgaattttatgctactgaaggtgttaaatatttgcagcagtctgatattccagactatctcaagcatgtggagacaaggttgcaagaagaacatgaaaggtgtattctatatttggaagctaacactaggaagccgcttataacagctacagaaaagcaattattgcagcggcacacatctgcaattcttgagaagggattcacaatgcttatggaagcaaatcgtgtaaaagacctctcgaggatgtacacactcttccagagggttgatgccattgagttgctaaagcaagcacttagttcatatattcggggcacaggccagggcattatcatggatgaagaaaaggacaaagaactggtgccctttcttctggaatttaaggcatcgcttgatagaatattggaggaaagttttgccaaaaatgaggctttctccaatacaataaaagagtcattcgaacatcttatcaatttacgccagaatcgacctgctgaattgattgcgaagtttcttgatgagaaacttcgagctggaaataaaggtacctccgaagaagagctggagggaatattggataaagttttggttctgttccgatttatacaaggaaaagatgtatttgaggcattctacaagaaggatctggctaagaggttgctgctggggaagagtgcatcgatagatgctgaaaaatcaatgataacaaagctcaaaactgagtgtggaagtcaatttaccaacaagctggagggaatgttcaaggacattgaattatccaaagaaataaatgagtctttcaagcaatcatctcaagcaaggacaaagcttccatctggcattgaaatgagtgttcacgtgcttacaacaggctattggccaacatatccaccaatggatgtgaaactcccccatgaacttaatgtctatcaggatatatttaaagaattctatttgagcaagtatagtggaaggcgtttgatgtggcaaaactcattgggtcactgtgtattaaaagcagagttcccaaaaggtaaaaaggaacttgcggtgtcactatttcagagtgtggttttgatgttgttcaatgatgcacaaaaactaagcttcctcgatatcaaggaatcgactggtattgaggataaagaattgcgaagaacgctgcaatcacttgcatgcggtaaagttcgggttctccaaaagatgccaaaagggcgagacgtagaagataaggacgaatttgtatttaatgaagaatttagtgcccctctctatcgcataaaggtgaatgctattcagatgaaggagacggttgaagaaaacacaagcacaactgagagagtattccaggacagacagtatcaggtggatgctgccatagttcgaataatgaagacacgtaaaaccctcagccacacgcttctaataactgagctttttcagcagctcaagttcccaatcaagccatcggatatcaagaaaagaatagagagcctaatcgacagggagtacctggagagagacaggagtaacccccagatctacaattacctggcttga

SEQ ID NO: 13876 - protein, 836 aa, Oryza sativa subsp. japonica
MSHPHATAPKRPGHFSSSSAAASSPTSPAQPHMKKAKFPGSSSSSSSAAAPGVTEKNGLHVDPTAAAARTGGRTNGEEDAEMVLADQEELAAPSASAPAGVAANLFRKKATLPQPSAARKPLRIKIGQPKLPTNFEEDTWAILKDAITAIFLKQKLSCDVEKLYQAAGDLCLHKLGANLYERIKKECEVHISAKISALVGQSPDLVVFLSLVQRTWQDFCDQMLIIRGIALLLDVKYVKNVANICSVWDMGLKLFRKHLSLSPEIEHKTVTGLLRLIESERLGEAIDRTLLSHLLKMFTALGMYSESFEKPFLECTSEFYATEGVKYLQQSDIPDYLKHVETRLQEEHERCILYLEANTRKPLITATEKQLLQRHTSAILEKGFTMLMEANRVKDLSRMYTLFQRVDAIELLKQALSSYIRGTGQGIIMDEEKDKELVPFLLEFKASLDRILEESFAKNEAFSNTIKESFEHLINLRQNRPAELIAKFLDEKLRAGNKGTSEEELEGILDKVLVLFRFIQGKDVFEAFYKKDLAKRLLLGKSASIDAEKSMITKLKTECGSQFTNKLEGMFKDIELSKEINESFKQSSQARTKLPSGIEMSVHVLTTGYWPTYPPMDVKLPHELNVYQDIFKEFYLSKYSGRRLMWQNSLGHCVLKAEFPKGKKELAVSLFQSVVLMLFNDAQKLSFLDIKESTGIEDKELRRTLQSLACGKVRVLQKMPKGRDVEDKDEFVFNEEFSAPLYRIKVNAIQMKETVEENTSTTERVFQDRQYQVDAAIVRIMKTRKTLSHTLLITELFQQLKFPIKPSDIKKRIESLIDREYLERDRSNPQIYNYLA

SEQ ID NO: 13877 - DNA, 2196 bp, Oryza sativa
  CDS (1)..(2196)
atgaactcgcagaagaagcgcagccccaagatcgagcccttccggcaccgcgtggatgcggacccaaagtccttcgacaaatcgtggaagaagctcgaggacgccatccgcgagatttacaaccacaacgccagcggcctctccttcgaggagctgtacaggactgcttataacttggttcttcacaagcatggtctgaagctatatgataaactcacagagaatttaaaaggacacctgaaagaaatgtgcagatcaataggggatgcccaaggtagtttgtttctggaggaactgcagagaagatgggctgatcacaataaggcactacaaatgatcagagatatactcatgtatatggataggacatttattacaactaacaaaaagacacctgtctttgaccttggtctagagttgtggagagatatcgttgtccgcgctcccaaaattcatgggaggttgcttgacacactccttgaactcattcatagagagaggatgggtgagatgataaacagaggtctgatgaggagtaccaccaaaatgttgatggatctagggtcttctgtctatcatgatgactttgagaagccattccttgaggtatccgcaagtttctatagtggtgagtcacaacagttcattgagtgctgtgattgtggcgaatatctcaagaaagctgagagacggcttgctgaagagttggagcgtgtttctcagtatatggatgccaaaactgcagacaaaataactagtgttgtggacactgagatgcttgcaaatcacatgcagcggttgattcttatggagaattctggtcttgtgaatatgcttgttgatgacaaacatgaagaccttagcaggatgtacaacttgtttaaacgtgttcctgatgggcattcaacaattagatctgtgatggcctctcatgttaaggaaagtggaaaggcattggtatctgacccagagaagataaaggaccctgttgagtttgtccagcgtcttctaaatgagaaagacaagtatgatgagatcataagtatttcattcagcaatgacaaggctttccaaaatgctctgaattcctccttcgagaatttcatcaacttgaacaaccgatctcctgaattcatttcgctgtttgttgatgacaagctccggaaaggggtgaaaggggccaatgaagaggatgttgaaactgtcttggacaaggtgatgatgctcttcagatatttgcaggagaaagatgtttttgagaaatattacaagcaacacttggccaaacgtcttctatctgggaaaactacttctgatgaagctgagaggagtatgcttgtgaagctgaagacggaatgtggctaccagtttacgtcaaaattggaaggcatgttcaatgatctaaagacatcgcatgatactatgcaaagtttttatgctaatctctctggtgatactgatagcccaacaatatcagtccagatactcaccactgggtcttggccaacacagccatgtaccccctgcaaacttccacctgaaattgttgatatatctgagaaattccgggcattctaccttggcacccacaatggcaggagattgacatggcaaacaaacatggggaatgcagatatcaaagcaacgttcggaggccgcaggcatgagttgaatgtctcgacatatcagatgtgtgtcctgatgctgtttaattcagcagatggcttgacttacggtgacattgagcaggccacaggtataccacatgctgatctgaaacgctgcctccagtctcttgcttgtgttaagggtaagaatgtgctgcggaaggaacccatgagcaaggatatatctgaagatgacactttctactacaatgacaagttcacaagcaagttggtcaaggtgaagattggcaccgtggttgctcagaaagaaacagaaccagagaagttggaaactcgccagagagttgaggaagacaggaaacctcaaattgaggctgcaattgtcagaatcatgaagtccagaagagtcttggaccacaatagcataatcacggaggtgacaaagcagcttcaatcgcgctttttgccaaatcctgttgtgataaagaaaagaatagagtccctgatcgagagggagttcttggagagggacaaggtagataggaagatgtaccgttatcttgcatag

SEQ ID NO: 13878 - protein, 731 aa, Oryza sativa
MNSQKKRSPKIEPFRHRVDADPKSFDKSWKKLEDAIREIYNHNASGLSFEELYRTAYNLVLHKHGLKLYDKLTENLKGHLKEMCRSIGDAQGSLFLEELQRRWADHNKALQMIRDILMYMDRTFITTNKKTPVFDLGLELWRDIVVRAPKIHGRLLDTLLELIHRERMGEMINRGLMRSTTKMLMDLGSSVYHDDFEKPFLEVSASFYSGESQQFIECCDCGEYLKKAERRLAEELERVSQYMDAKTADKITSVVDTEMLANHMQRLILMENSGLVNMLVDDKHEDLSRMYNLFKRVPDGHSTIRSVMASHVKESGKALVSDPEKIKDPVEFVQRLLNEKDKYDEIISISFSNDKAFQNALNSSFENFINLNNRSPEFISLFVDDKLRKGVKGANEEDVETVLDKVMMLFRYLQEKDVFEKYYKQHLAKRLLSGKTTSDEAERSMLVKLKTECGYQFTSKLEGMFNDLKTSHDTMQSFYANLSGDTDSPTISVQILTTGSWPTQPCTPCKLPPEIVDISEKFRAFYLGTHNGRRLTWQTNMGNADIKATFGGRRHELNVSTYQMCVLMLFNSADGLTYGDIEQATGIPHADLKRCLQSLACVKGKNVLRKEPMSKDISEDDTFYYNDKFTSKLVKVKIGTVVAQKETEPEKLETRQRVEEDRKPQIEAAIVRIMKSRRVLDHNSIITEVTKQLQSRFLPNPVVIKKRIESLIEREFLERDKVDRKMYRYLA

SEQ ID NO: 13879 - DNA, 2082 bp, Oryza sativa subsp. japonica
  CDS (1)..(2082)
atgtgcacgcagaagccgccgcacgactactcgcagcagctctacgacaagtaccgggagtcattcgaggagtacatcacctccatggtcttaccttcattaagagataaacatgacgagtttatgctgagggaactagtaaagaggtggtcaaaccataaaatcatggttcggtggctgtcacgtttcttcttttatcttgatcgatacttcatctcacggaggtcgcttataccacttgaacaagttgggcttacttgcttccgagatttgatataccaagaaatcaaaggacaagttaaaggtgcagtgatagctctgattgacaaagagcgtgaaggcgaacagatagacagggccctgctgaagaatgtcctgggcatatttgttgaaattggactaggcagtatggaatgttatgagaatgactttgaagatttcttgcttaaggatactacagattactactctctcaaggctcaaagctggattctcgaggactcttgtcctgattacatgataaaggctgaggagtgcttgaagaaagagaaggagcgagttggtcactacttgcatattagtagtgaacagaagttactggagaaagtgcaaaatgaattgcttgcacaatatgcaactcccctgttggagaaggagcattctgggtgttttgcattgcttcgtgatgacaaggaggaagacctttctaggatgtacaggctcttctccaaaattaaccgcggtctagaacctattgctaacatgtttaaaacgcatgttacaaatgagggcacagccttggtcaagcaagcagaagattctgctagtaataagaagcccgagaaaaaggacatggttggtatgcaggaacaggtttttgtctggaaaatcattgagctccatgacaagtatgtagcttatgtcacagaatgtttccagggtcacaccctctttcataaggcccttaaagaagcattcgaggtcttctgtaacaagggtgtctctggcagttcaagtgctgaactgcttgccaccttctgtgacaatattctgaagaaaggttgcagtgaaaagctcagtgatgaagccatcgaagatgctcttgagaaggtggtgcgattgcttgcatacatcagcgataaagacctctttgctgagttttacaggaaaaaacttgcaaggagattgctttttgataagagtgccaatgatgaacatgaaagaagcatacttaccaaactcaagcagcagtgtggtggacaatttacttctaaaatggagggaatggttactgatcttactgttgcaagggaccatcaaactaagtttgaagagtttgtggctgcacatcaggagttgaatcctgggatagacttggctgtcactgttttgacaacaggattctggccaagttacaagactttcgatattaaccttcctgctgagatggtgaaatgcgtggaggttttcaaggagttttaccaaacaagaacaaaacacagaaagcttacctggatatattccttgggaacctgcaatatcaatgcaaagtttgaggcaaaaactattgagctcattgtcacaacatatcaggctgcgttgctgctgctattcaacggatctgacaggcttacttattctgagattgtaacacagctaaacttatcagatgatgatgtagtgcgtttgctccattctctctcctgtgcaaaatacaagattcttaacaaggaaccagctaatagatctatttctcccaacgatgtttttgagttcaattcaaaattcactgacaggatgagaagaattaagatacccctacctcctgttgatgaaaagaaaaaggttgtcgaagatgttgacaaggacaggcggtatgcaattgatgcatcgattgtgcgcattatgaagagtcgcaaagttatgggccatcagcagctagttgcggaatgtgtggagcagctcagccgcatgttcaagcctgacttcaaagccatcaagaagcgaatcgaggacctcatcacaagggattacctggaacgcgagaaggacaacgctaatgtgtacagatacctggcttga

SEQ ID NO: 13880 - protein, 693 aa, Oryza sativa subsp. japonica
MCTQKPPHDYSQQLYDKYRESFEEYITSMVLPSLRDKHDEFMLRELVKRWSNHKIMVRWLSRFFFYLDRYFISRRSLIPLEQVGLTCFRDLIYQEIKGQVKGAVIALIDKEREGEQIDRALLKNVLGIFVEIGLGSMECYENDFEDFLLKDTTDYYSLKAQSWILEDSCPDYMIKAEECLKKEKERVGHYLHISSEQKLLEKVQNELLAQYATPLLEKEHSGCFALLRDDKEEDLSRMYRLFSKINRGLEPIANMFKTHVTNEGTALVKQAEDSASNKKPEKKDMVGMQEQVFVWKIIELHDKYVAYVTECFQGHTLFHKALKEAFEVFCNKGVSGSSSAELLATFCDNILKKGCSEKLSDEAIEDALEKVVRLLAYISDKDLFAEFYRKKLARRLLFDKSANDEHERSILTKLKQQCGGQFTSKMEGMVTDLTVARDHQTKFEEFVAAHQELNPGIDLAVTVLTTGFWPSYKTFDINLPAEMVKCVEVFKEFYQTRTKHRKLTWIYSLGTCNINAKFEAKTIELIVTTYQAALLLLFNGSDRLTYSEIVTQLNLSDDDVVRLLHSLSCAKYKILNKEPANRSISPNDVFEFNSKFTDRMRRIKIPLPPVDEKKKVVEDVDKDRRYAIDASIVRIMKSRKVMGHQQLVAECVEQLSRMFKPDFKAIKKRIEDLITRDYLEREKDNANVYRYLA

SEQ ID NO: 13881 - DNA, 2442 bp, Oryza sativa subsp. japonica
  CDS (1)..(2442)
atgaagaaggccaagttccccggctcctcctcctcctcctcctccgccgccgcccccggggtcaccgagaagaacgggctccacgtcgatcccacggccgccgccgcccggaccggtgggcgcaccaacggcgaggaggatgcggagatggtgctcgccgaccaggaggagctcgccgctccgagcgcatcggccccggcgggggtcgccgccaacctcttccggaagaaggccacactcccccagccatccgccgcccgcaagcccctccgaatcaaaataggtcagccaaaattgccaacaaactttgaggaggatacatgggctattttgaaagatgctattacagctatatttctaaaacagaaactttcgtgcgatgttgaaaaactttaccaggctgcaggtgacctttgtctacacaagctaggcgcaaatctatacgaacgcataaagaaagaatgtgaagtacacatatcggcaaaaatatcagcattagtgggtcaaagtccagatttagtagtatttttgtctctggtgcaaagaacatggcaagatttttgcgatcagatgttgattattcgtggtattgctttacttcttgatgtaaaatatgtcaagaatgttgcaaacatttgttcagtgtgggacatggggttgaagctattccgcaagcatctttcactgtctccggagattgaacacaaaactgttactggtcttctaagattaattgagagtgagaggcttggtgaagcaatagacaggacattacttagtcatcttctgaagatgtttactgctcttggaatgtattctgagagttttgaaaagccctttctggagtgtacatctgaattttatgctactgaaggtgttaaatatttgcagcagtctgatattccagactatctcaagcatgtggagacaaggttgcaagaagaacatgaaaggtgtattctatatttggaagctaacactaggaagccgcttataacagctacagaaaagcaattattgcagcggcacacatctgcaattcttgagaagggattcacaatgcttatggaagcaaatcgtgtaaaagacctctcgaggatgtacacactcttccagagggttgatgccattgagttgctaaagcaagcacttagttcatatattcggggcacaggccagggcattatcatggatgaagaaaaggacaaagaactggtgccctttcttctggaatttaaggcatcgcttgatagaatattggaggaaagttttgccaaaaatgaggctttctccaatacaataaaagagtcattcgaacatcttatcaatttacgccagatcagctcaagcccttttttccaacagaatcgacctgctgaattgattgcgaagtttcttgatgagaaacttcgagctggaaataaaggtacctccgaagaagagctggagggaatattggataaagttttggttctgttccgatttatacaaggaaaagatgtatttgaggcattctacaagaaggatctggctaagaggttgctgctggggaagagtgcatcgatagatgctgaaaaatcaatgataacaaagctcaaaactgagtgtggaagtcaatttaccaacaagctggagggaatgttcaaggacattgaattatccaaagaaataaatgagtctttcaagcaatcatctcaagcaaggacaaagcttccatctggcattgaaatgagtgttcacgtgcttacaacaggctattggccaacatatccaccaatggatgtgaaactcccccatgaacttaatgtctatcaggatatatttaaagaattctatttgagcaagtatagtggaaggcgtttgatgtggcaaaactcattgggtcactgtgtattaaaagcagagttcccaaaaggtaaaaaggaacttgcggtgtcactatttcagagtgtggttttgatgttgttcaatgatgcacaaaaactaagcttcctcgatatcaaggaatcgactggtattgaggataaagaattgcgaagaacgctgcaatcacttgcatgcggtaaagttcgggttctccaaaagatgccaaaagggcgagacgtagaagataaggacgaatttgtatttaatgaagaatttagtgcccctctctatcgcataaaggtgaatgctattcagatgaaggagacggttgaagaaaacacaagcacaactgagagagtattccaggacagacagtatcaggtggatgctgccatagttcgaataatgaagacacgtaaaaccctcagccacacgcttctaataactgagctttttcagcagctcaagttcccaatcaagccatcggatatcaagaaaagaatagagagcctaatcgacagggagtacctggagagagacaggagtaacccccagatctacaattacctggcttga

SEQ ID NO: 13882 - protein, 813 aa, Oryza sativa subsp. japonica
MKKAKFPGSSSSSSSAAAPGVTEKNGLHVDPTAAAARTGGRTNGEEDAEMVLADQEELAAPSASAPAGVAANLFRKKATLPQPSAARKPLRIKIGQPKLPTNFEEDTWAILKDAITAIFLKQKLSCDVEKLYQAAGDLCLHKLGANLYERIKKECEVHISAKISALVGQSPDLVVFLSLVQRTWQDFCDQMLIIRGIALLLDVKYVKNVANICSVWDMGLKLFRKHLSLSPEIEHKTVTGLLRLIESERLGEAIDRTLLSHLLKMFTALGMYSESFEKPFLECTSEFYATEGVKYLQQSDIPDYLKHVETRLQEEHERCILYLEANTRKPLITATEKQLLQRHTSAILEKGFTMLMEANRVKDLSRMYTLFQRVDAIELLKQALSSYIRGTGQGIIMDEEKDKELVPFLLEFKASLDRILEESFAKNEAFSNTIKESFEHLINLRQISSSPFFQQNRPAELIAKFLDEKLRAGNKGTSEEELEGILDKVLVLFRFIQGKDVFEAFYKKDLAKRLLLGKSASIDAEKSMITKLKTECGSQFTNKLEGMFKDIELSKEINESFKQSSQARTKLPSGIEMSVHVLTTGYWPTYPPMDVKLPHELNVYQDIFKEFYLSKYSGRRLMWQNSLGHCVLKAEFPKGKKELAVSLFQSVVLMLFNDAQKLSFLDIKESTGIEDKELRRTLQSLACGKVRVLQKMPKGRDVEDKDEFVFNEEFSAPLYRIKVNAIQMKETVEENTSTTERVFQDRQYQVDAAIVRIMKTRKTLSHTLLITELFQQLKFPIKPSDIKKRIESLIDREYLERDRSNPQIYNYLA

SEQ ID NO: 13883 - DNA, 2517 bp, Neurospora crassa
  CDS (1)..(2517)
atggcatcgagaaccaacaagatcaggcccataaggaagccgataacgaatcgagaccagagcgagttcgagccatgctgggcccttttgcgcgacgccatgaccgatattcacctacagaacgccggccgtctgtccttcgaacaactataccgagcttcatacaagattgtgcttcggaagaagggcgccctactctacgagagggttagagactttgagcaggagtggttccgagatcacatcatgccgaacatcgccgccctgatcaccaagaacctgatcaacatatcgctgcttcagcacccggggtcgagttcacatgagcgcagggagatgggcgaaaagttcctgcgcggaatacgagactcatggacggatcacaataggtctatgaacatgattgcggatgtgctcatgtatctcgaccgtgtctataccctagagacgaagcagccctctctgtttgccgttacaattggtctcttccggaacaatgtcctccggagccacattggcgccgccgcagaagacatcgagcaagactttgtcgtctttgacattctctgcgccgtcatattggacctgatcaacatggagcgcgacggcgatatcatcaaccgaaacctagtgcgcaaaataactgcgatgcttgagagcttatacgagacagatgacgagatcgaaaaccatcggctttacctaacccttttcgaacctcggtatctcgaggcaagcaccgagttttaccgtaaagagtgtgagaagctggtccaggaagcaaattgcagcacgtggctccgccatgcccaacggcgactaaacgaggagcgcgagcgatgtggtactaccctatcaattatgacgaccgacaaaatcgcgagtgttgtggagaaggagctcatcgaggcaaagctcgatgtctttctggccatggaggggagcggcctgaagcccatgatcgacaatgatcgcttggacgacctttcgatcctgtaccaactcatatccagagtggacagtacgaaatcggcgctaaaggttattctacaacgtagagtgcgggagcttggactggagattgagaaggcgctcaagaacacagacttttccgtcgctggtgcagctgctggggatggtgaggatgctggcgaagcggcagagaaggccaaaccccagaccttgaatccggctcagcagcaaaccgctgccgctatcaagtgggtggacgacgtattgcagcttaaggacaagttcgacagaatattgtccgattgcttctgcgatgatctcctgctacagtccgctatcacacgaagcttctccgacttcatcaactctttcaatcgcagttctgaatatgtttctctattcattgatgacaacctcaaacgcggcatcaagaccaagacggaagccgaagtagacgctgtcttggataaagccatcgttcttctcagatatcttacagatcgagacatgttcgaaaggtattaccagaaacatctggccaagcggctactgcatgggaagtctgaaatccataccgagaaggagatggtatcccgtatgaagtcagaaatgggcaatcatttcacatccaagtttgaaggcatgttcaaggacatggagttgtccaaggacctaaccgacaactaccgtgaccatatcgccagtttaggtgatgccgactataagatggttgacctcaacatcaacgtcctgaccaccaacaactggccacccgaggtaatgggtggtggtacgtcgaagggagaaggggcgaaactggattgcttctatccacccgaaatcaagcggctccaggagagcttttacaagtactacctgaaggacaggagcggccgtgttcttacatgggttagctcggcgggcaatgcggacatcaagtgtgtgttccccaaggttccgggcaaggagactggacctttgagcaaggaaaggcggtatgagctaaacgtctcgacgtatggcatgattgtgcttatgctgttcaacgatctcgtggacggcgaaagtttgagcttcgacgagatccaagccaagacgaacattccggcaccagagctcatgcggacactggcttcactttcgagtgttcccaagtgcagggtactgctaaaggaaccggccacaaagaacgtcaaaaataccgacaagttctcttacaacgcacagtttgtgagtaaggctatcaggatcaaagctcccgttataagcagcatttccaaggtcgagggagacgaggagcgaaaggagacggaaaggaagaatgatcagacgcgcgctcatgttatcgatgcggcggttgtcagaattatgaagcaacgcaagttactggcccacaccaagctcgtaaacgaggtgatctcgcaactcatgggccgcttcaagcccgacgtaccgctaatcaagaaacggatcgaggacctcctggcgagagagtacctggagcgggttgaaggtgactcgtcaacgtaccgatacttggcttag

SEQ ID NO: 13884 - protein, 838 aa, Neurospora crassa
MASRTNKIRPIRKPITNRDQSEFEPCWALLRDAMTDIHLQNAGRLSFEQLYRASYKIVLRKKGALLYERVRDFEQEWFRDHIMPNIAALITKNLINISLLQHPGSSSHERREMGEKFLRGIRDSWTDHNRSMNMIADVLMYLDRVYTLETKQPSLFAVTIGLFRNNVLRSHIGAAAEDIEQDFVVFDILCAVILDLINMERDGDIINRNLVRKITAMLESLYETDDEIENHRLYLTLFEPRYLEASTEFYRKECEKLVQEANCSTWLRHAQRRLNEERERCGTTLSIMTTDKIASVVEKELIEAKLDVFLAMEGSGLKPMIDNDRLDDLSILYQLISRVDSTKSALKVILQRRVRELGLEIEKALKNTDFSVAGAAAGDGEDAGEAAEKAKPQTLNPAQQQTAAAIKWVDDVLQLKDKFDRILSDCFCDDLLLQSAITRSFSDFINSFNRSSEYVSLFIDDNLKRGIKTKTEAEVDAVLDKAIVLLRYLTDRDMFERYYQKHLAKRLLHGKSEIHTEKEMVSRMKSEMGNHFTSKFEGMFKDMELSKDLTDNYRDHIASLGDADYKMVDLNINVLTTNNWPPEVMGGGTSKGEGAKLDCFYPPEIKRLQESFYKYYLKDRSGRVLTWVSSAGNADIKCVFPKVPGKETGPLSKERRYELNVSTYGMIVLMLFNDLVDGESLSFDEIQAKTNIPAPELMRTLASLSSVPKCRVLLKEPATKNVKNTDKFSYNAQFVSKAIRIKAPVISSISKVEGDEERKETERKNDQTRAHVIDAAVVRIMKQRKLLAHTKLVNEVISQLMGRFKPDVPLIKKRIEDLLAREYLERVEGDSSTYRYLA

SEQ ID NO: 13885 - DNA, 2220 bp, Nicotiana tabacum
  CDS (1)..(2220)
  misc_feature (1413)..(1413): n is a, g, c or t
atggcaatgagccagatgaagattattgaattggaggaaggatgggagtttatgcagaagggagtcacaaagttgaagaaaattttagaaggacagcaagattctttcaactctgaagagtacatgatgctctacacaactatatataacatgtgtacgcagaagcccccgcatgattactcacaacagctgtatgagaagtacaaggaagcttttgaagaatacatcaattctactgttctgcctgctttaagagagaggcatgatgagtttatgttgagggagtttgtgaaaagatgggcgaatcataaacttatggtcaggtggctctcacggttcttctattatcttgaccggtattttattgcccgaaggtcgctacctgcacttaacgaagttggtctgacgtgcttccgcgatctggtttatcaggagttgaacagtaaagctagagatgcagttattgtgttgattgatcaagaacgtgagggtgagcagattgacagggccttactgaagaacgtgcttgatatatttgttggaattggaatggggcaaatggagtattacgaaaatgactttgaagatgcaatgcttaaagataccgcagcttattattctcggaaagcttcaagttggatcgtggaagattcttgtccagattatatgttgaaggcggaggagtgcttgaagaaagagaaggatagagtgtctcattatctccatgttagtagtgagacaaaacttttggagaaagtgcaaaatgaattattggttgtatataccaatcagttacttgagaaggagcattctggatgccgagctttgcttagagatgataaggtagaggatttatctcgaatgtataggctattccacagaattcctaagggattggagcctgttgcaaatatgtttaaacagcatgtcacttctgaaggcatggtcttggtgcaacaggctgaagatacggcaagtaacaaggctgaaagttcgggctcaggggagcaggtcttcgttaggaagttgattgagctccacgacaagtatatggcttatgttacagagtgttttactaataactctctctttcataaggctctgaaggaggcatttgaggtcttctgtaacaagattgtgtcaggttgttcaagtgcagagctccttgcttcttattgtgataatattcttaaaaaaggcgggagtgaaaagctcagtgatgacgctattgaggagacattggataaggtggtcaagcttctcgcgtacatcagtgacaaagacctttatgcggagttctacaggaagaagctttctcgtcgattgctctttgataaaagtgccaatgatgaccatgaaaggcttatcttaacaaagctgaagcagcagtgtggtggacagtttacatctaanatggagggaatggtaacagacttgacattggctagggaaaatcagaaccactttcaggaatatctcagcaacaaccctgcagcaagtcctggaatcgatttaactgtcacagttcttacaactggattctggcctagttataaatcttctgatttgagtctcccagtggaaatggtaaaaagtgtggaagtcttcaaggaattctatcagacgaaaacaaaacacaggaaattgacatggatttattcattgggtacatgtaacataaacgggaagtttgcgcctaaaaccatcgaactgattgtgggaacttatcaggctgctgctctgttactgtttaatgcttcagatagattgagttactcagaaatcaagagtcaattaaatttggcggatgatgacttggtcagattgcttcattccctttcatgtgccaagtataaaattctgaccaaggagcctagcaatagaactgtctcaccatctgatcattttgagttcaactccaagttcactgacaggatgagaaggattagggtcccattgcctcctgcggatgaaaggaaaaaggtggttgaggatgtggacaaagatagacgttatgcaattgatgcctgtatcgtgcgcattatgaagagtcggaaggttcttcctcatcaacagctagtgttggagtgtgttgagcagttgagccgaatgtttaagcctgatttcaaagcaatcaaaaagcgaattgaagatcttatcactcgggattacttggaaagagacaaagagaacccgaacttgtttaagtacttggcctga

SEQ ID NO: 13886 - protein, 739 aa, Nicotiana tabacum
  misc_feature (471)..(471): The Xaa at location 471 stands for Asn, or Lys.
MAMSQMKIIELEEGWEFMQKGVTKLKKILEGQQDSFNSEEYMMLYTTIYNMCTQKPPHDYSQQLYEKYKEAFEEYINSTVLPALRERHDEFMLREFVKRWANHKLMVRWLSRFFYYLDRYFIARRSLPALNEVGLTCFRDLVYQELNSKARDAVIVLIDQEREGEQIDRALLKNVLDIFVGIGMGQMEYYENDFEDAMLKDTAAYYSRKASSWIVEDSCPDYMLKAEECLKKEKDRVSHYLHVSSETKLLEKVQNELLVVYTNQLLEKEHSGCRALLRDDKVEDLSRMYRLFHRIPKGLEPVANMFKQHVTSEGMVLVQQAEDTASNKAESSGSGEQVFVRKLIELHDKYMAYVTECFTNNSLFHKALKEAFEVFCNKIVSGCSSAELLASYCDNILKKGGSEKLSDDAIEETLDKVVKLLAYISDKDLYAEFYRKKLSRRLLFDKSANDDHERLILTKLKQQCGGQFTSXMEGMVTDLTLARENQNHFQEYLSNNPAASPGIDLTVTVLTTGFWPSYKSSDLSLPVEMVKSVEVFKEFYQTKTKHRKLTWIYSLGTCNINGKFAPKTIELIVGTYQAAALLLFNASDRLSYSEIKSQLNLADDDLVRLLHSLSCAKYKILTKEPSNRTVSPSDHFEFNSKFTDRMRRIRVPLPPADERKKVVEDVDKDRRYAIDACIVRIMKSRKVLPHQQLVLECVEQLSRMFKPDFKAIKKRIEDLITRDYLERDKENPNLFKYLA

SEQ ID NO: 13887 - DNA, 2226 bp, Nicotiana tabacum
  CDS (1)..(2226)
atgacgatgaaccagatgaagactattgagttggaggaaggatgggagttcatgcagaagggaatcacaaaattaaaaataattttagaagggagtccagattcatttagttctgaagagtacatgatgctctacaccactatctataacatgtgtacacagaagccgcctcatgattactctcagcagctatatgagaaatacaaggaagcttttgaagaatacatcaattctacagttctgtcttctttgagagagaagcatgatgagtttatgctgagggagcttgtaaaaagatgggcaaatcataaacttatggtcagatggctttcacggttcttccattatcttgatcggtattttattgctcgaaggtcactcccagcacttaatgaagttggtctgacgtgcttccgtgatttggtttatcaggagttgaaaagtaaagcaagagatgcagttatagcactgattgatcaagaacgtgagggtgagcagattgatagagctttattgaagaatgtgcttggtatatttgtcgaaattggaatgggggagatggagtactacgaaaatgactttgaagatgccatgcttaaagatactgccgcatattattctcgaaaagcatcaaactggattgtggaagattcttgtccagattatatgttgaaggcagaagagtgcttgaaaaaagagaaggatagagtgtctcattatttacactctagcagcgaggcaaaacttctggagaaagttcaaaatgagttattggttgtatataccaatcaattgcttgagaaggagcattctggatgccgagctctgcttatagacgataaggtagaggatttatctcgaatgtataggttattccacagaatccctaaagggttggaaccagttgcaaatatgtttaagcagcatgtcactgctgaaggcatggtcttggtgcaacaggcccgaagactcagcaagttaacaaggctgaaagttccagtggttcacaggagcaggtatttgttaggaaggttattgagctgccttgacaagtatatggcatatgtgaccaactgttttgcaaataactctctctttcacaaggctctaaaagaggcatttgaggtcttctgtaacaaagttgttgctggctgttctagtgcagagctccttgcttcttattgtgataatatccttaagaagggtgggagtgaaaaacttagtgatgatgctattgaggaaacattggataaggtggtaaagcttctagcatatatcagtgacaaagacctgtttgctgagttctacaggaagaagctttctcgtcgattgctttttgataaaagtgccaatgacgaccatgaaaggcttatcttaacaaagttaaagcagcagtgtggtgggcagtttacgtcaaagatggagggaatggtgacagacttgacattagcgaaagaaaatcagaaccactttcaggaatatctcagcaacaactcggcagctaatcctggaatagatttgactgtcacagttcttacaactggcttttggcctagttataaatcttctgatctgagtctccccgtggaaatggtgaagtgtgtagaagtcttcaaggaattttatcagacaaaaacgaaacacaggaaattgacctggatttattcattgggtacatgtaacatcaatggcaagtttgaaccaaaaactattgagctgattgtgggaacttaccaggctgctgctctattactgtttaatgcttcggatagattgagttactcacatatcaaaagtcagttaaatttggcagacgatgacttagtcagattgcttcaatccctgtcatgtgctaagtataaaattctgactaaagagcctaccagtagaactgtttcgtcaacagatcattttgaattcaactccaagtttactgacagaatgaggaggattaggatccctttgcctcctgtagatgaaaggaaaaaagtggtcgaggatgttgacaaggacagacgttatgcaattgatgcttgtattgtgcgcataatgaagagccggaaggtgcttccccattcgcagctcgtgtccgagtgtgttgagcaattgagccgcatgtttaagcctgatttcaaagcaatcaaaaagcggattgaagatcttatcacccgggactacttggaaagggacaaagagaacccaaacttgttcaagtacttggcctga

SEQ ID NO: 13888 - protein, 741 aa, Nicotiana tabacum
MTMNQMKTIELEEGWEFMQKGITKLKIILEGSPDSFSSEEYMMLYTTIYNMCTQKPPHDYSQQLYEKYKEAFEEYINSTVLSSLREKHDEFMLRELVKRWANHKLMVRWLSRFFHYLDRYFIARRSLPALNEVGLTCFRDLVYQELKSKARDAVIALIDQEREGEQIDRALLKNVLGIFVEIGMGEMEYYENDFEDAMLKDTAAYYSRKASNWIVEDSCPDYMLKAEECLKKEKDRVSHYLHSSSEAKLLEKVQNELLVVYTNQLLEKEHSGCRALLIDDKVEDLSRMYRLFHRIPKGLEPVANMFKQHVTAEGMVLVQQARRLSKLTRLKVPVVHRSRYLLGRLLSCLDKYMAYVTNCFANNSLFHKALKEAFEVFCNKVVAGCSSAELLASYCDNILKKGGSEKLSDDAIEETLDKVVKLLAYISDKDLFAEFYRKKLSRRLLFDKSANDDHERLILTKLKQQCGGQFTSKMEGMVTDLTLAKENQNHFQEYLSNNSAANPGIDLTVTVLTTGFWPSYKSSDLSLPVEMVKCVEVFKEFYQTKTKHRKLTWIYSLGTCNINGKFEPKTIELIVGTYQAAALLLFNASDRLSYSHIKSQLNLADDDLVRLLQSLSCAKYKILTKEPTSRTVSSTDHFEFNSKFTDRMRRIRIPLPPVDERKKVVEDVDKDRRYAIDACIVRIMKSRKVLPHSQLVSECVEQLSRMFKPDFKAIKKRIEDLITRDYLERDKENPNLFKYLA

SEQ ID NO: 13889 - DNA, 2229 bp, Arabidopsis thaliana
  CDS (1)..(2229)
atggaggaagatccaactcccgccgccgctaatctctctcggaagaaagctacacttccgcaacctactaagaagtttgtaatcaagctcaataaagccaaaccaactctaccaacaaactttgaggagaatacatgggagaagttgcagtcagctatcagagctatattcctcaaaaaaaaaatttcgtttgacctcgagagcctttaccaggctgttgataacctttgcttgcataagttggatggaaagctttatgaccagattgagaaggagtgtgaagaacacatctctgcagctttgcaatctttagttgggcagaacactgatctgactgttttcttgtcacgtgttgagaaatgctggcaagacttttgtgaccagatgctcatgattcgtagtatagccttgactctggataggaagtatgtgatacagaatccaaatgtacgttcattatgggagatgggtttgcagcttttccggaagcatctttctctggcccctgaagttgagcagaggacggttaaaggtctcttaagtatgattgaaaaagaaaggttagcagaagctgttaataggactctactaagccatcttttgaagatgtttactgcactgggaatttatatggaaagctttgagaaacctttccttgaagggacctctgaattttatgccgctgaaggaatgaaatacatgcagcagtctgacgttccggagtacctgaagcatgttgagggaaggttgcatgaagagaatgagagatgcatactctacatagatgcagtaaccaggaaaccattgatcacaactgttgaaaggcaacttctcgaacgtcatatacttgttgttcttgaaaagggttttacaacattaatggatggacgtcgtacggaggaccttcagaggatgcaaaccttgttttctagggtcaatgcacttgagtctctgaggcaggcgctaagttcatatgttcggaaaactgggcagaagattgttatggatgaagagaaagacaaagatatggtacaatcactgttggacttcaaggcttctcttgacataatatgggaagagagcttttacaagaacgaatcatttggtaacacaatcaaagattcgtttgagcatctgattaatcttcgacagaaccggccagctgagcttattgccaagtttttggacgagaaactccgtgctgggaataagggtacttctgaagaagaattggagagtgttcttgaaaaagtcttggttttgttcagatttatccagggtaaagatgtgttcgaagcattttacaaaaaggatcttgcgaagagactcctgttgggaaagagtgcttcaatcgatgctgagaaatccatgatctctaagcttaagactgagtgtggtagccagtttacaaacaagctcgaagggatgttcaaggatattgaattgtcaaaggaaatcaacgagtcattcaaacaatcttcccaggccagaacaaaactgccatcgggaattgagatgagtgtccacgttttaacaacagggtactggccaacatatccgcctatggatgttaagcttcctcatgaactaaatgtctatcaggatatcttcaaagagttctatttaagcaagtacagtggtaggaggttaatgtggcaaaattcattaggccactgtgttttaaaggcagatttctccaaaggtaaaaaggagctggctgtttccctgtttcaggctgttgtgttaatgttatttaacgatgcaatgaaacttagctttgaagacattaaagattccaccagcatagaggacaaggagctgaggaggactttgcagtcgcttgcttgtgggaaagtccgtgtcctgcagaagaatcctaagggaagagatgtagaagacggtgatgaatttgaatttaatgatgagtttgcagctccgctgtatcgcattaaggtaaatgcgatccagatgaaagagacagtagaggagaacacaagtacaacggaaagagtattccaggaccgacaataccagatcgatgcagccattgttcgtattatgaagacaagaaaagtcttgagccatactcttctaatcactgagctcttccaacagctcaaattcccgataaagcctgctgatctgaagaagaggattgagagcttgatcgatcgagaatatttggagagggaaaaaagcaaccctcagatatacaattatcttgcttag

SEQ ID NO: 13890 - protein, 742 aa, Arabidopsis thaliana
MEEDPTPAAANLSRKKATLPQPTKKFVIKLNKAKPTLPTNFEENTWEKLQSAIRAIFLKKKISFDLESLYQAVDNLCLHKLDGKLYDQIEKECEEHISAALQSLVGQNTDLTVFLSRVEKCWQDFCDQMLMIRSIALTLDRKYVIQNPNVRSLWEMGLQLFRKHLSLAPEVEQRTVKGLLSMIEKERLAEAVNRTLLSHLLKMFTALGIYMESFEKPFLEGTSEFYAAEGMKYMQQSDVPEYLKHVEGRLHEENERCILYIDAVTRKPLITTVERQLLERHILVVLEKGFTTLMDGRRTEDLQRMQTLFSRVNALESLRQALSSYVRKTGQKIVMDEEKDKDMVQSLLDFKASLDIIWEESFYKNESFGNTIKDSFEHLINLRQNRPAELIAKFLDEKLRAGNKGTSEEELESVLEKVLVLFRFIQGKDVFEAFYKKDLAKRLLLGKSASIDAEKSMISKLKTECGSQFTNKLEGMFKDIELSKEINESFKQSSQARTKLPSGIEMSVHVLTTGYWPTYPPMDVKLPHELNVYQDIFKEFYLSKYSGRRLMWQNSLGHCVLKADFSKGKKELAVSLFQAVVLMLFNDAMKLSFEDIKDSTSIEDKELRRTLQSLACGKVRVLQKNPKGRDVEDGDEFEFNDEFAAPLYRIKVNAIQMKETVEENTSTTERVFQDRQYQIDAAIVRIMKTRKVLSHTLLITELFQQLKFPIKPADLKKRIESLIDREYLEREKSNPQIYNYLA

SEQ ID NO: 13891 - DNA, 2229 bp, Pisum sativum
  CDS (1)..(2229)
atgagtgaacgcaagactatcgacttagatcaaggatgggattttatgctgaagggaataaagaagctgaagaatattctagaagggctacctgaacctcagttcacctctgatgactatatgatgctatacacgaccatatacaatatgtgcactcagaagcctcctcatgactattcccaaccattgtatgacaagtataaggaatcatttgaagagtacatcatatcaacagtattgccttctttgagagagaagcatgatgaatttatgttgcgtgaacttgtgaggaggtgggctaaccataaaatcatggttagatggctttctcgtttctttcactatttggatcgatattttatagctcgaaggtcacttccgccgcttaatgaagttggattgacttgcttccgtgatttggtttacaaggaaataaatgggaaagtgagagatgccgtgatttctcttattgatcaagaacgggaaggagagcagattgatcgagctctattaaaaaatgtattagatatatttgttgaaattggaatggggcaaatggatcaatatgacaatgattttgaagctgccatgctcaaagacacttctgcatattattctcgaaaggcttcaaactggatcctagaagattcttgtcctgattatatgctcaaggctgaggagtgcttgaaacgggagaaagatagggttgctcattacctacactctagcagcgagtcaaagttattagagaaagttcaacatgagcttttatctgtgtatgcaaaccaacttcttgaaaaagagcattctggatgtcattcattacttacagatgacaaggttgaagacttgtcgaggatgttcagactcttctctaaaataccccgaggcttggagcctgtttcctgtatatttaagcagcatgttactgcagaaggtacagcattggtgaagttggctgaagatgcagcaagtaacaggaaggcagagaaaagagatattgttggtttacaagagcagatttttgttcgaaaagtgattgagctgcatgacaagtacctggcatatgtgagcgactgtttccaaaatcatactctattccacaaggctcttaaggaggcttttgagattttttgcaacaagggtgttgctggaagctcaagtgccgaactgcttgccactttttgtgataatattctcaagaaaggaggaagtgaaaaattgagtgatgaagcaattgaagatacttttgagaaggttgtcaagctacttgcctatattagtgataaggatttgtttgccgaattttataggaaaaagcttgctcgaaggcttctttttgataagagtgctaatgatgaccatgagaggagtattttaacaaaattgaagcaacaatgtggtggtcaatttacctcaaagatggaaggaatggttaccgatttgacgctggcaaaggagaatcaaacaagctttgaagaatatttaagcaataatcctaatatagaccctggaattgacttgacagttacagttctgaccactggttttgggcctagttataaatcttttgacctcaatctccctgcagagatggttaggtgtgtagaagtttttaaggaattttatcaaacaaaaactaagcacagaaagcttacttggatttattccttgggtacctgtaatgtaagtgggaaatttgaaccaaaaactatggagctggttgtgacgacataccaggcttctgcactgcttcttttcaattcctcagatagactgagttattctgagataatgactcagttgaacttgaccgacgatgatgttgttagactgcttcactccttatcatgtgccaaatacaagattcttaccaaggagccaagcacgaaaacaatatcacctactgatcattttgaatttaattccaaatttacagacaaaatgaggaggatcaagattcctcttcctcctgtggatgagaagaaaaaagtaattgaggatgttgacaaggacagaagatatgctattgatgcctcaattgttcgtattatgaagagtcggaaagttttgagttaccaacagttagttatggagtgcgtggagcagttaggccgcatgtttaagcccgatgtcaaggcaattaagaagcgtattgaagacttgatctctagagactacctcgaaagagacagagataatgcaaatttgttcaagtacttggcatga

SEQ ID NO: 13892 - protein, 742 aa, Pisum sativum
MSERKTIDLDQGWDFMLKGIKKLKNILEGLPEPQFTSDDYMMLYTTIYNMCTQKPPHDYSQPLYDKYKESFEEYIISTVLPSLREKHDEFMLRELVRRWANHKIMVRWLSRFFHYLDRYFIARRSLPPLNEVGLTCFRDLVYKEINGKVRDAVISLIDQEREGEQIDRALLKNVLDIFVEIGMGQMDQYDNDFEAAMLKDTSAYYSRKASNWILEDSCPDYMLKAEECLKREKDRVAHYLHSSSESKLLEKVQHELLSVYANQLLEKEHSGCHSLLTDDKVEDLSRMFRLFSKIPRGLEPVSCIFKQHVTAEGTALVKLAEDAASNRKAEKRDIVGLQEQIFVRKVIELHDKYLAYVSDCFQNHTLFHKALKEAFEIFCNKGVAGSSSAELLATFCDNILKKGGSEKLSDEAIEDTFEKVVKLLAYISDKDLFAEFYRKKLARRLLFDKSANDDHERSILTKLKQQCGGQFTSKMEGMVTDLTLAKENQTSFEEYLSNNPNIDPGIDLTVTVLTTGFGPSYKSFDLNLPAEMVRCVEVFKEFYQTKTKHRKLTWIYSLGTCNVSGKFEPKTMELVVTTYQASALLLFNSSDRLSYSEIMTQLNLTDDDVVRLLHSLSCAKYKILTKEPSTKTISPTDHFEFNSKFTDKMRRIKIPLPPVDEKKKVIEDVDKDRRYAIDASIVRIMKSRKVLSYQQLVMECVEQLGRMFKPDVKAIKKRIEDLISRDYLERDRDNANLFKYLA

SEQ ID NO: 13893 - DNA, 2379 bp, Arabidopsis thaliana
  CDS (1)..(2379)
atgtctcttcctaccaaacgctctactttctccgccgcttctgcctccgacgactcttcttactcttctcctccgatgaaaaagaccaaaaacgacctccaccattcccctcaacaccctaataccgccgacaaggttgttggctttcatatggaggaagatccaactcccgccgccgctaatctctctcggaagaaagctacacttccgcaacctactaagaagtttgtaatcaagctcaataaagccaaaccaactctaccaacaaactttgaggagaatacatgggagaagttgcagtcagctatcagagctatattcctcaaaaaaaaaatttcgtttgacctcgagagcctttaccaggctgttgataacctttgcttgcataagttggatggaaagctttatgaccagattgagaaggagtgtgaagaacacatctctgcagctttgcaatctttagttgggcagaacactgatctgactgttttcttgtcacgtgttgagaaatgctggcaagacttttgtgaccagatgctcatgattcgtagtatagccttgactctggataggaagtatgtgatacagaatccaaatgtacgttcattatgggagatgggtttgcagcttttccggaagcatctttctctggcccctgaagttgagcagaggacggttaaaggtctcttaagtatgattgaaaaagaaaggttagcagaagctgttaataggactctactaagccatcttttgaagatgtttactgcactgggaatttatatggaaagctttgagaaacctttccttgaagggacctctgaattttatgccgctgaaggaatgaaatacatgcagcagtctgacgttccggagtacctgaagcatgttgagggaaggttgcatgaagagaatgagagatgcatactctacatagatgcagtaaccaggaaaccattgatcacaactgttgaaaggcaacttctcgaacgtcatatacttgttgttcttgaaaagggttttacaacattaatggatggacgtcgtacggaggaccttcagaggatgcaaaccttgttttctagggtcaatgcacttgagtctctgaggcaggcgctaagttcatatgttcggaaaactgggcagaagattgttatggatgaagagaaagacaaagatatggtacaatcactgttggacttcaaggcttctcttgacataatatgggaagagagcttttacaagaacgaatcatttggtaacacaatcaaagattcgtttgagcatctgattaatcttcgacagaaccggccagctgagcttattgccaagtttttggacgagaaactccgtgctgggaataagggtacttctgaagaagaattggagagtgttcttgaaaaagtcttggttttgttcagatttatccagggtaaagatgtgttcgaagcattttacaaaaaggatcttgcgaagagactcctgttgggaaagagtgcttcaatcgatgctgagaaatccatgatctctaagcttaagactgagtgtggtagccagtttacaaacaagctcgaagggatgttcaaggatattgaattgtcaaaggaaatcaacgagtcattcaaacaatcttcccaggccagaacaaaactgccatcgggaattgagatgagtgtccacgttttaacaacagggtactggccaacatatccgcctatggatgttaagcttcctcatgaactaaatgtctatcaggatatcttcaaagagttctatttaagcaagtacagtggtaggaggttaatgtggcaaaattcattaggccactgtgttttaaaggcagatttctccaaaggtaaaaaggagctggctgtttccctgtttcaggctgttgtgttaatgttatttaacgatgcaatgaaacttagctttgaagacattaaagattccaccagcatagaggacaaggagctgaggaggactttgcagtcgcttgcttgtgggaaagtccgtgtcctgcagaagaatcctaagggaagagatgtagaagacggtgatgaatttgaatttaatgatgagtttgcagctccgctgtatcgcattaaggtaaatgcgatccagatgaaagagacagtagaggagaacacaagtacaacggaaagagtattccaggaccgacaataccagatcgatgcagccattgttcgtattatgaagacaagaaaagtcttgagccatactcttctaatcactgagctcttccaacagctcaaattcccgataaagcctgctgatctgaagaagaggattgagagcttgatcgatcgagaatatttggagagggaaaaaagcaaccctcagatatacaattatcttgcttag

SEQ ID NO: 13894 - protein, 792 aa, Arabidopsis thaliana
MSLPTKRSTFSAASASDDSSYSSPPMKKTKNDLHHSPQHPNTADKVVGFHMEEDPTPAAANLSRKKATLPQPTKKFVIKLNKAKPTLPTNFEENTWEKLQSAIRAIFLKKKISFDLESLYQAVDNLCLHKLDGKLYDQIEKECEEHISAALQSLVGQNTDLTVFLSRVEKCWQDFCDQMLMIRSIALTLDRKYVIQNPNVRSLWEMGLQLFRKHLSLAPEVEQRTVKGLLSMIEKERLAEAVNRTLLSHLLKMFTALGIYMESFEKPFLEGTSEFYAAEGMKYMQQSDVPEYLKHVEGRLHEENERCILYIDAVTRKPLITTVERQLLERHILVVLEKGFTTLMDGRRTEDLQRMQTLFSRVNALESLRQALSSYVRKTGQKIVMDEEKDKDMVQSLLDFKASLDIIWEESFYKNESFGNTIKDSFEHLINLRQNRPAELIAKFLDEKLRAGNKGTSEEELESVLEKVLVLFRFIQGKDVFEAFYKKDLAKRLLLGKSASIDAEKSMISKLKTECGSQFTNKLEGMFKDIELSKEINESFKQSSQARTKLPSGIEMSVHVLTTGYWPTYPPMDVKLPHELNVYQDIFKEFYLSKYSGRRLMWQNSLGHCVLKADFSKGKKELAVSLFQAVVLMLFNDAMKLSFEDIKDSTSIEDKELRRTLQSLACGKVRVLQKNPKGRDVEDGDEFEFNDEFAAPLYRIKVNAIQMKETVEENTSTTERVFQDRQYQIDAAIVRIMKTRKVLSHTLLITELFQQLKFPIKPADLKKRIESLIDREYLEREKSNPQIYNYLA

SEQ ID NO: 13895 - DNA, 2253 bp, Oryza sativa
  CDS (1)..(2253)
atggcgacccacgagcggaagacgatcgatctggagcaggggtgggagttcatgcagaagggcatcaccaagctgaagaacatcctcgaggggaagcccgaaccccagttcagctccgaggactacatgatgctctacacgacgatttacaacatgtgcacgcagaagccgccgcacgactactcgcagcagctctacgagaagtaccgcgagtccttcgaggagtacatcacgtccatggtcttaccttcattaagagagaaacatgatgagtttatgctgagagagctagtaaaacggtggtcaaaccataaagtgatggttcggtggctatcacgcttcttccattatcttgatcggtactttatttcaaggaggtccctaccacaactaagtgaagttgggcttagctgtttccgggatctggtatatcaagagatcaaaggaaaagtaaaaagtgcggtgatatccttgacatactttctcgaacagatagatcaagaacgtgagggtgaacaaattgatagggccctgttaaagaatgttctggatatatttgttgagattggcttgactagcatggactactacgaaaatgattttgaagatttcttgctcaaagatactgcagactattactctataaaagcccagacctggattcttgaggactcttgtccagattacatgttaaaggcagaggagtgtctgaaaagggagaaagagcgagttgctcattatttgcactccagtagtgaacagaagttgttggagaaagtgcaacatgagttgctaactcaatacgcaagtcagctcctggagaaggagcattctggatgccatgcattgcttcgtgatgacaaggttgatgatctctctagaatgtacaggctcttttccagaataactcgtggtttagaacctgtttctcaaatatttaagcagcatgttactaatgagggcactgccttagtgaagcaagccgaagatgctgctagtaataagaagccagagaagaaggagatagttggtttacaggaacaggtttttgtccggaaaatcattgagcttcatgacaagtatgtagcttatgttacggattgttttcaggggcacactctcttccataaggcacttaaggaggcttttgaagttttttgcaacaaaggtgtttctggcagttcaagtgctgaattactagctaccttctgtgacaatatcttaaagaaaggcggtagtgaaaagcttagtgatgaagcaattgaagatacccttgagaaggttgtaaggttacttgcctacattagtgacaaggacttgtttgctgagttctatagaaagaagcttgcaaggagattgctttttgacaagagtgctaatgatgaacatgagagaagcatccttaccaagctaaagcaacaatgtggagggcagttcacttccaaaatggagggcatggttactgatctcactgtggcaagagatcaccaggctaaatttgaagagttcataagcacacactcagagttgaatcctggaatagccttagctgttactgtcctcacaacaggattttggccaagttacaaatcttttgatataaatctacctgcagaaatggtgaaatgtgtagaggttttcaaggagttttaccaaacaagaacaaaacacaggaaacttacctggatttattcactgggaacctgtaatattaatgctaaatttgaggccaaaactattgagctcattgttacaacttatcaggctgcattgctgctgctgtttaatggagttgatagactcagctattctgagattgtgacacagttaaatctctcagatgatgatgttgttcgattgctccattctctatcttgtgcaaaatacaagattcttagcaaagaaccaaataatagatctatttcaccaaatgatgtcttcgagttcaactcaaagtttactgacaagctgcgaagattaaagatacctcttcctccagttgatgagaagaagaaagtagttgaagatgttgataaggatcgcagatacgcaattgatgcatcaattgtgcgtattatgaagagtcgcaaagtattgggtcatcagcaacttgtgatggaatgtgtggagcagcttggacgcatgtttaagcctgacttcaaggcaataaagaagcgaattgaggatcttatcacaagggattacttggagagggataaagacaacccaaatgtgtacagatacttggcttga

SEQ ID NO: 13896 - protein, 750 aa, Oryza sativa
MATHERKTIDLEQGWEFMQKGITKLKNILEGKPEPQFSSEDYMMLYTTIYNMCTQKPPHDYSQQLYEKYRESFEEYITSMVLPSLREKHDEFMLRELVKRWSNHKVMVRWLSRFFHYLDRYFISRRSLPQLSEVGLSCFRDLVYQEIKGKVKSAVISLTYFLEQIDQEREGEQIDRALLKNVLDIFVEIGLTSMDYYENDFEDFLLKDTADYYSIKAQTWILEDSCPDYMLKAEECLKREKERVAHYLHSSSEQKLLEKVQHELLTQYASQLLEKEHSGCHALLRDDKVDDLSRMYRLFSRITRGLEPVSQIFKQHVTNEGTALVKQAEDAASNKKPEKKEIVGLQEQVFVRKIIELHDKYVAYVTDCFQGHTLFHKALKEAFEVFCNKGVSGSSSAELLATFCDNILKKGGSEKLSDEAIEDTLEKVVRLLAYISDKDLFAEFYRKKLARRLLFDKSANDEHERSILTKLKQQCGGQFTSKMEGMVTDLTVARDHQAKFEEFISTHSELNPGIALAVTVLTTGFWPSYKSFDINLPAEMVKCVEVFKEFYQTRTKHRKLTWIYSLGTCNINAKFEAKTIELIVTTYQAALLLLFNGVDRLSYSEIVTQLNLSDDDVVRLLHSLSCAKYKILSKEPNNRSISPNDVFEFNSKFTDKLRRLKIPLPPVDEKKKVVEDVDKDRRYAIDASIVRIMKSRKVLGHQQLVMECVEQLGRMFKPDFKAIKKRIEDLITRDYLERDKDNPNVYRYLA

SEQ ID NO: 13897 - DNA, 2211 bp, Zea mays
  CDS (1)..(2211)
atgagcagcggcggcccgccgaggaagcgcaacttcaagatcgaggcgttcaagaaccgtgtggacctcgaccccaagtacgcggagcggacatggaaggtcctcgagcacgccatccacgagatctacaaccgtaacgccagtggtctctccttcgaggagctttacaggagtgcctacaacatggtgcttcacaagtacggagagaagctgtatgatggccttcagagcacaatgacttggcgcttgaaggaaatatcaaaatcaatagaggctgcacagggtggcttatttttggaggagctgaatgcaaagtggatggatcacaacaaggcactacagatgatacgagatattcttatggacatggacaggacatatgtccctacatctcataggacacctgttcatgagcttggtctgaatttgtggagggatcacataattcactcccccatgatccatagtcggctggttaacacccttttggatcttataaaaagggaaagaatgggtgaagtgattaacagaggcctgatgaggagcataacaaagatgctgatggacctgggtcctgctgtgtatcaagacgattttgagaaaccatttctggatgtttcagcccgcttctacagtgtggagtctcaagagttcattgtgtgctgtgactgtgggaactaccttaagaaggccgagagacgtctaaatgaggaaatggagcgtgtctcacactacttggatgctggcagtgaggcaaagataactagtgtagtggagaaagaaatgatagccaatcacatgcacagattggttcacatggaaaattcagggcttgttaacatgctagtagatgaccaatacaaagatttgggtcggatgtattccttgttccgaagggttcctgatgggttatcaacgattagagatgtcatgacttcttacttgagggaaacagggaagcagttagtgatagatccagaaagtttgaaagatccagtggaatttgttcaacgcttgttaaatgagaaggacaaacatgataagatcatcagtgttgccttcggcaatgacaaaaccttccagaatgctctgaattcgtctttcgagtatttcctcaacttaaacagccgatcacctgaattcatatcattatatgttgatgacaaactccgcaaaggacttaaaggagcaacggaagaagatgtggaagttatattggacaaagtcatgatgctgttccgatacctccaggagaaggatgtgtttgaaaagtactataagcagcatttggcgaaaaggctcctgtctagcaaaactgtttctgatgatgctgagagaagtatgatagttaaactcaagacagaatgtggataccagttcacttccaagctagagggcatgttcactgatatgaaaacctcccaggacaccatgcaagacttctatgccaagaagtctgaggaacttggggatggccctacgcttgatgtccacattttgacaactggttcttggcctacgcagcccagtcctccttgcaaccttccaactgaaatacttacagtatgtgagaaattccgggcatattatcttggaactcacaatggcaggagattgacatggcaaacaaacatgggtacagctgatataaaagccacatttggaaaaggccagaagcatgaactaaatgtatccacttatcagatgtgtgttctcatgctgtttaacaatgctgatggattgacctacaaagacattgaacgggatactgagatacctgcctcagacctaaagagatgtctgcagtcacttgcttgtgtcaaggggaaaaatgttctccgtaaggagcctatgagcaaggacatatctgaggatgacacattctacttcaatgataagttcacaagcaagcttgttaaagtgaagattgggacagtggtggcacagaaggaatctgaaccagagaaacaggagactcgccaacgggttgaggaggacaggaaacctcagatcgaagcagccattgtcaggatcatgaaatcacggagggtgttggatcataacagcattgtagctgaggtcaccaagcaattgcaagcccgtttcttgccaaatcctgttgtcataaagaaacgcattgaatctctgattgaacgagagttcttggaaagagacaaagtagatagaaaattatatcgttatcttgcatag

SEQ ID NO: 13898 - protein, 736 aa, Zea mays
MSSGGPPRKRNFKIEAFKNRVDLDPKYAERTWKVLEHAIHEIYNRNASGLSFEELYRSAYNMVLHKYGEKLYDGLQSTMTWRLKEISKSIEAAQGGLFLEELNAKWMDHNKALQMIRDILMDMDRTYVPTSHRTPVHELGLNLWRDHIIHSPMIHSRLVNTLLDLIKRERMGEVINRGLMRSITKMLMDLGPAVYQDDFEKPFLDVSARFYSVESQEFIVCCDCGNYLKKAERRLNEEMERVSHYLDAGSEAKITSVVEKEMIANHMHRLVHMENSGLVNMLVDDQYKDLGRMYSLFRRVPDGLSTIRDVMTSYLRETGKQLVIDPESLKDPVEFVQRLLNEKDKHDKIISVAFGNDKTFQNALNSSFEYFLNLNSRSPEFISLYVDDKLRKGLKGATEEDVEVILDKVMMLFRYLQEKDVFEKYYKQHLAKRLLSSKTVSDDAERSMIVKLKTECGYQFTSKLEGMFTDMKTSQDTMQDFYAKKSEELGDGPTLDVHILTTGSWPTQPSPPCNLPTEILTVCEKFRAYYLGTHNGRRLTWQTNMGTADIKATFGKGQKHELNVSTYQMCVLMLFNNADGLTYKDIERDTEIPASDLKRCLQSLACVKGKNVLRKEPMSKDISEDDTFYFNDKFTSKLVKVKIGTVVAQKESEPEKQETRQRVEEDRKPQIEAAIVRIMKSRRVLDHNSIVAEVTKQLQARFLPNPVVIKKRIESLIEREFLERDKVDRKLYRYLA

SEQ ID NO: 13899 - DNA, 2199 bp, Glycine max
  CDS (1)..(2199)
atgagtaaccagaaaaagaggaatttccagatagaggcgtttaagcaccgcgtggtgatggatcccaagtacgccgacaagacatggaagattctcgaacatgcgattcacgagatttacaaccacaacgctagcggtctcagttttgaagagctttacagaaatgcatacaacatggtgcttcacaaatttggggagaagctctactcagggctggttgcgaccatgactgggcatctcaaagctatagctcaatctgttgaagctgctcaaggaggttcttttctggaagagctgaacaggaaatggaatgatcataataaggcgttacaaatgatcagagacatactgatgtacatggataggacctacattccaagcacccagaagactcctgttcatgaacttgggctgaacctgtggaaagaaaatgtcatttattccagccagatcaggactcggctattgaatacacttctggaattagtacatagtgaacgcactggtgaagttattgatagaggcattatgagaaatataacaaaaatgcttatggatttaggcccttctgtttatgggcaagattttgagactcattttcttcaagtttcagctgagttttaccaggcagaatcccagaaattcatcgagtgttgcgattgtggtgattatctgaaaaaagctgagaggcgtttgaatgaggaaatggaaagagtgagccattacttggattccaggacagaaaagaagattactaatgtggtggagaaggagatgattgaaaatcatatgctaagattaattcatatggagaattctggcttagtgcacatgctttgtgatgataaatatgaagatatgagtagaatgtataacttgtttcgtcgtgttactgatggtctttcaaaaattcgagaagtgatgacttcacatatgcgagagtctggtaaacaacttgttgctgatcctgaaagattgaaggatccagtcgaatatgtgcagaggctcttagatgagaaagataaatatgacaagatcataaacttggcattcatcaatgacaagtctttccagaatgctttgaattcctcatttgaatatttcatcaatctgaatcctcgttctccagagttcatttcactatttgtagatgataaactccggaaaggtctaaaaggggttagtgaggatgatgtagaggttactcttgacaaggtgatgatgctgttccgatacctgcaagaaaaagatgtttttgagaagtactacaaacagcatttggcaaagcggcttttgtctggaaaaacagtttctgatgatgcagagagaagtctcatagttaagctcaagacagaatgtggttaccaatttacatctaaattggagggaatgtttacagacatgaaaacctctcaggacacaatgcagggcttttatggctgccaccctgaactaagtgacggtcctacgcttactgtccaagttcttacaacagggtcttggccaactcagtctagtgttacatgcaacttgccagcagaaatgtctgcgctgtgcgagaagtttcggtcattttaccttggcacccatactggcaggagattgtcctggcaaactaatatgggcacggcagacttgaaagcaacctttgggaaggggcagaagcacgagttaaatgtctctacttaccaaatgtgtgttgtcatgctgtttaataatgctgatagactgagctacaaggagattgagcaagcaactgagattcctgcttcggatcttaaaagatgcttgcaatcattggctttagttaagggaagaaatgtccttagaaaggaacctatgggtaaagatattggtgacgatgatgcattctatgttaatgacaagttcagcagcaaactttacaaggttaaaataggaactgtagttgcacaaaaggaatctgaacctgagaagctggaaacccgacagagagtggaggaagacaggaagccccagattgaagcagcaattgtgaggatcatgaaatccaggaagcaacttgatcataacaatcttatagcggaggtcacgaagcagttgcaatcgcgtttcctggcaaatccaacggaggtaaagaaacggattgagtctctcattgagcgggactttttggagagggatgatagtgacagaagattgtaccgatatcttgcttag

SEQ ID NO: 13900 - protein, 732 aa, Glycine max
MSNQKKRNFQIEAFKHRVVMDPKYADKTWKILEHAIHEIYNHNASGLSFEELYRNAYNMVLHKFGEKLYSGLVATMTGHLKAIAQSVEAAQGGSFLEELNRKWNDHNKALQMIRDILMYMDRTYIPSTQKTPVHELGLNLWKENVIYSSQIRTRLLNTLLELVHSERTGEVIDRGIMRNITKMLMDLGPSVYGQDFETHFLQVSAEFYQAESQKFIECCDCGDYLKKAERRLNEEMERVSHYLDSRTEKKITNVVEKEMIENHMLRLIHMENSGLVHMLCDDKYEDMSRMYNLFRRVTDGLSKIREVMTSHMRESGKQLVADPERLKDPVEYVQRLLDEKDKYDKIINLAFINDKSFQNALNSSFEYFINLNPRSPEFISLFVDDKLRKGLKGVSEDDVEVTLDKVMMLFRYLQEKDVFEKYYKQHLAKRLLSGKTVSDDAERSLIVKLKTECGYQFTSKLEGMFTDMKTSQDTMQGFYGCHPELSDGPTLTVQVLTTGSWPTQSSVTCNLPAEMSALCEKFRSFYLGTHTGRRLSWQTNMGTADLKATFGKGQKHELNVSTYQMCVVMLFNNADRLSYKEIEQATEIPASDLKRCLQSLALVKGRNVLRKEPMGKDIGDDDAFYVNDKFSSKLYKVKIGTVVAQKESEPEKLETRQRVEEDRKPQIEAAIVRIMKSRKQLDHNNLIAEVTKQLQSRFLANPTEVKKRIESLIERDFLERDDSDRRLYRYLA

SEQ ID NO: 13901 - DNA, 2328 bp, Glycine max
  CDS (1)..(2328)
atgtctaatacgaaactgtcaccgcctatgaagaaggcgaaatctatcgactccaagaacgacgacgccgttttgaaatcccccgccgccgcttccgatgaccccaatgcgcccgctctcgtcgccgccaatctgtctcgcaaaaaagccactcctccccatccccccaagaagcttctcattaagttccacaaaggtataccaacattgcccccaaattttgaggaggatacatgggcaaaattgaagtcagctattggtgctatattcttgaagcaacctgtttcttgtgacttggagaatctttatcaggctgtgaatgatctttgcctttacaaaatggggggaaatctttatcaacgaattgaaaaggagtgtgaagcacatatatctgcagcactgcagtctttagttggccaaagcccagatttgattgtttttctatcgctagttgagagatgttggcaggatctttgtgaccaaatgttgatgattcgtggtatagccttgtttctggataggacgtatgtgaaacaaacaacaaatgtacagtcattatgggacatgggtttgcaacttttctgcaaatatctttctctatctccagaagtagaacataaaactgttactggtcttcttcgtatgatcggaagtgaaagatcaggtgaatcagtggatagaactcttctaaatcatcttttgaagatgtttactgctctgggaatttatgcagaaacctttgagaagccattccttgagtgcacatccgaattttatgctgctgaaggtatgaaatacatgcagcaatcagatgctccagattacttgaagcatgttgagacaagattgcaagaggaacatgaaagatgtttgttgtacttggatgcaagtactaggaaaccattgatagcaactgcggaaaagcaacttcttgaacgtcatatacctgccattcttgataagggttttactgtgcttatggatgggaatcgtattgaagaccttcagagaatgcactcgctcttttcaagggtcaatgctcttgaatcactgaagcaggcccttagttcatacatcaggagaactgggcagggcattgttatggatgaggagaaagataaagatatggtctcatcccttcttgaatttaaggcttctcttgacacaatatgggaagaaagctttttcaagaatgaagctttcagcaattcaattaaagatgcatttgagtatcttatcaatcttcgtcagaaccgacctgcagagttgattgccaagtttttggatgagaagcttcgtgcaggtaataagggtacttctgaagaggaactggaggctacacttgataaagtcctggtgttattcaggttcattcagggcaaggatgtatttgaagcattctataagaaagatcttgctaaaagactgcttttaggaaagagtgcttctattgacgctgagaaatctatgatctccaagttgaagactgagtgtggcagccagttcacaaacaaactggaaggaatgtttaaggacattgaattatcaaaagaaataaatgattcattcaaacagtcatcacaggcgaggtcaaaacttgcatcagggattgaaatgagtgttcatgttttaactacagggcactggccaacatatccgcccatggatgttagacttcctcatgaattgaatgtttaccaggatattttcaaagagttctatctaagcaaatacagtggaagacgtctgatgtggcaaaattcactaggtcattgtgtcttgaaggcagagtttcccaaaggaagaaaggagttggctgtgtccctatttcagactgttgttctaatgttattcaatgatgctgagaagctaagtcttcaagatatcaaagatgctactggtattgaggacaaggaactcagaaggactctgcaatcactagcttgtggtaaagttcgtgtcctacaaaagatgcccaaaggaagagatgtggaggacgatgacttatttgtttttaatgatgggtttacagctcctctttaccgtataaaggtgaatgcaattcaattgaaggagacagtcgaggagaacacaagcaccaccgaaagagttttccatgaccgtcaatatcagattgatgctgctattgtgaggataatgaagactagaaaagtgcttagtcacacccttcttattactgaactcttccaacagctgaaattcccaataaaaccagctgatttgaaaaaaaggattgaaagcctcattgacagggagtatctagagagggacaagagcaatcctcaaatatacaattacctcgcataa

SEQ ID NO: 13902 - protein, 775 aa, Glycine max
MSNTKLSPPMKKAKSIDSKNDDAVLKSPAAASDDPNAPALVAANLSRKKATPPHPPKKLLIKFHKGIPTLPPNFEEDTWAKLKSAIGAIFLKQPVSCDLENLYQAVNDLCLYKMGGNLYQRIEKECEAHISAALQSLVGQSPDLIVFLSLVERCWQDLCDQMLMIRGIALFLDRTYVKQTTNVQSLWDMGLQLFCKYLSLSPEVEHKTVTGLLRMIGSERSGESVDRTLLNHLLKMFTALGIYAETFEKPFLECTSEFYAAEGMKYMQQSDAPDYLKHVETRLQEEHERCLLYLDASTRKPLIATAEKQLLERHIPAILDKGFTVLMDGNRIEDLQRMHSLFSRVNALESLKQALSSYIRRTGQGIVMDEEKDKDMVSSLLEFKASLDTIWEESFFKNEAFSNSIKDAFEYLINLRQNRPAELIAKFLDEKLRAGNKGTSEEELEATLDKVLVLFRFIQGKDVFEAFYKKDLAKRLLLGKSASIDAEKSMISKLKTECGSQFTNKLEGMFKDIELSKEINDSFKQSSQARSKLASGIEMSVHVLTTGHWPTYPPMDVRLPHELNVYQDIFKEFYLSKYSGRRLMWQNSLGHCVLKAEFPKGRKELAVSLFQTVVLMLFNDAEKLSLQDIKDATGIEDKELRRTLQSLACGKVRVLQKMPKGRDVEDDDLFVFNDGFTAPLYRIKVNAIQLKETVEENTSTTERVFHDRQYQIDAAIVRIMKTRKVLSHTLLITELFQQLKFPIKPADLKKRIESLIDREYLERDKSNPQIYNYLA

SEQ ID NO: 13903 - DNA, 2211 bp, Zea mays
  CDS (1)..(2211)
atgagcagcggcggcccgccgaggaagcgcaacttcaagatcgaggcgttcaagaaccgtgtggacctcgaccccaagtacgcggagcggacatggaaggtcctcgagcacgccatccacgagatctacaaccgtaacgccagtggtctctccttcgaggagctttacaggagtgcctacaacatggtgcttcacaagtacggagagaagctgtatgatggccttcagagcacaatgacttggcgcttgaaggaaatatcaaaatcaatagaggctgcacagggtggcttatttttggaggagctgaatgcaaagtggatggatcacaacaaggcactacagatgatacgagatattcttatggacatggacaggacatatgtccctacatctcataggacacctgttcatgagcttggtctgaatttgtggagggatcacataattcactcccccatgatccatagtcggctggttaacacccttttggatcttataaaaagggaaagaatgggtgaagtgattaacagaggcctgatgaggagcataacaaagatgctgatggacctgggtcctgctgtgtatcaagacgattttgagaaaccatttctggatgtttcagcccgcttctacagtgtggagtctcaagagttcattgtgtgctgtgactgtgggaactaccttaagaaggccgagagacgtctaaatgaggaaatggagcgtgtctcacactacttggatgctggcagtgaggcaaagataactagtgtagtggagaaagaaatgatagccaatcacatgcacagattggttcacatggaaaattcagggcttgttaacatgctagtagatgaccaatacaaagatttgggtcggatgtattccttgttccgaagggttcctgatgggttatcaacgattagagatgtcatgacttcttacttgagggaaacagggaagcagttagtgatagatccagaaagtttgaaagatccagtggaatttgttcaacgcttgttaaatgagaaggacaaacatgataagatcatcagtgttgccttcggcaatgacaaaaccttccagaatgctctgaattcgtctttcgagtatttcctcaacttaaacagccgatcacctgaattcatatcattatatgttgatgacaaactccgcaaaggacttaaaggagcaacggaagaagatgtggaagttatattggacaaagtcgtgatgctgttccgatacctccaggagaaggatgtgtttgaaaagtactataagcagcatttggcgaaaaggctcctgtctagcaaaactgtttctgatgatgctgagagaagtatgatagttaaactcaagacagaatgtggataccagttcacttccaagctagagggcatgttcactgatatgaaaacctcccaggacaccatgcaagacttctatgccaagaagtctgaggaacttggggatggccctacgcttgatgtccacattttgacaactggttcttggcctacgcagcccagtcctccttgcaaccttccaactgaaatacttacagtatgtgagaaattccgggcatattatcttggaactcacaatggcaggagattgacatggcaaacaaacatgggtacagctgatataaaagccacatttggaaaaggccagaagcatgaactaaatgtatccacttatcagatgtgtgttctcatgctgtttaacaatgctgatggattgacctacaaagacattgaacgggatactgagatacctgcctcagacctaaagagatgtctgcagtcacttgcttgtgtcaaggggaaaaatgttctccgtaaggagcctatgagcaaggacatatctgaggatgacacattctacttcaatgataagttcacaagcaagcttgttaaagtgaagattgggacagtggtggcacagaaggaatctgaaccagagaaacaggagactcgccaacgggttgaggaggacaggaaacctcagatcgaagcagccattgtcaggatcatgaaatcacggagggtgttggatcataacagcattgtagctgaggtcaccaagcaattgcaagcccgtttcttgccaaatcctgttgtcataaagaaacgcattgaatctctgattgaacgagagttcttggaaagagacaaagtagatagaaaattatatcgttatcttgcatag

SEQ ID NO: 13904 - protein, 736 aa, Zea mays
MSSGGPPRKRNFKIEAFKNRVDLDPKYAERTWKVLEHAIHEIYNRNASGLSFEELYRSAYNMVLHKYGEKLYDGLQSTMTWRLKEISKSIEAAQGGLFLEELNAKWMDHNKALQMIRDILMDMDRTYVPTSHRTPVHELGLNLWRDHIIHSPMIHSRLVNTLLDLIKRERMGEVINRGLMRSITKMLMDLGPAVYQDDFEKPFLDVSARFYSVESQEFIVCCDCGNYLKKAERRLNEEMERVSHYLDAGSEAKITSVVEKEMIANHMHRLVHMENSGLVNMLVDDQYKDLGRMYSLFRRVPDGLSTIRDVMTSYLRETGKQLVIDPESLKDPVEFVQRLLNEKDKHDKIISVAFGNDKTFQNALNSSFEYFLNLNSRSPEFISLYVDDKLRKGLKGATEEDVEVILDKVVMLFRYLQEKDVFEKYYKQHLAKRLLSSKTVSDDAERSMIVKLKTECGYQFTSKLEGMFTDMKTSQDTMQDFYAKKSEELGDGPTLDVHILTTGSWPTQPSPPCNLPTEILTVCEKFRAYYLGTHNGRRLTWQTNMGTADIKATFGKGQKHELNVSTYQMCVLMLFNNADGLTYKDIERDTEIPASDLKRCLQSLACVKGKNVLRKEPMSKDISEDDTFYFNDKFTSKLVKVKIGTVVAQKESEPEKQETRQRVEEDRKPQIEAAIVRIMKSRRVLDHNSIVAEVTKQLQARFLPNPVVIKKRIESLIEREFLERDKVDRKLYRYLA

SEQ ID NO: 13905 - DNA, 2370 bp, Glycine max
  CDS (1)..(2370)
atgtctctccccaccaaacggtcgagcaccgctggttcctccctgtcgccgccacctcctatgaaaaaggccaagtccctcctcctccgctcctcctccgacgaccacgacgccgttttggacccttcctccatgcctctcgacgacgatctccccaatgcccgcgccgccaatctcgcccgcaagaaagccaccccgccccaacccgccaagaagctcctcatcaagctccacaaagctaaaccaacattgcccacaaatttcgaggaggatacatgggcaaaactaaagtctgccattggtgctatatttttgaagcaacctaactcttgtgacttggagaagctttatcaggctgtgaatgatctctgcctttataaaatgggtggaaatctttatcaacgaattgaaaaggagtgtgaagcacatatatctgcagcactgcagtctttggttggccaaagcccagatttggttgtttttctgtctctagttgagagatgttggcaggatctttgtgaccaaatgttgatgattcgtggtatagccttgtatctagataggacatatgtgaagcaaacagcaaatgtccgatcattatgggacatgggcttacaacttttccgcaaacatctttcattgtctcctgaagtagaacacaaaactgttacaggtcttctacgaatgattgaaagtgaaagaaaaggtgaagcagtggatagaactcttctaaaccaccttttgaagatgtttactgctctgggaatttatgcagaaagctttgagaagccattccttgaatgcacatctgaattttatgctgctgaaggtgtgaaatacatgcagcaatcagatgttccagattacttgaagcatgtggagatacgattgcaagaagaacatgaaagatgtttgatctacttggatgcaagtactaggaagccattgatagcaacagcagaaaaacaacttcttgaacgtcatatacctgccattcttgataagggctttgcaatgcttatggatgggaatcgtattgaagaccttcagagaatgtactcactcttttcaagggtcaatgccctcgagtcactgaggcaggccattagttcatatatcaggagaactggtcagggcattgttttggacgaggagaaagataaggatatggtttcatcccttttggaatttaaggcttctcttgacacaacatgggaagaaagcttttccaagaatgaagcattctgtaacaccatcaaagattcgtttgagcatctcatcaatcttcgtcagaaccgacctgctgaattgattgccaagtttttggatgagaaacttcgtgcaggtaacaagggcacttcagaagaagagttggagggtacacttgataaagtccttgttttattcaggttcattcagggcaaggatgtgtttgaggcattttataagaaagatcttgcaaaaagactgttgttgggaaagagtgcttctattgatgcagagaaatctatgatctccaagttgaagaccgagtgtggcagccagttcacaaacaaactagaagggatgtttaaggacattgaattatcaaaagaaataaacgagtccttcaaacagtcatcccaggctaggacaaaactcccatccgggattgaaatgagtgttcatgttttgacaactgggtactggccgacgtatccacccatggatgttagacttcctcatgaattgaatgtttaccaggatattttcaaagagttctatctaagtaaatatagtggaaggcgtctgatgtggcaaaattcattaggtcactgtgtcttaaaggcagagtttcctaaagggaaaaaagagttggctgtctccctatttcagactgttgttctgatgttattcaatgatgctgagaaactaagctttcaagatatcaaggactctactggtatagaggacaaggaactgagaaggactctgcaatcacttgcatgtggaaaagttcgtgtcctacaaaagttgccaaagggtagagatgtggaggatgatgactcatttgtttttaatgaagggtttacagctcctctttatcgtataaaggtgaatgcaattcagttgaaggagacagtagaggagaacacaagcaccactgaaagagttttccaagaccgtcaatatcaggttgatgctgctattgtgaggataatgaagactaggaaagtgcttagtcacacgcttcttattactgaactcttccaacagctcaaatttccaataaaaccagctgacttgaagaaaaggatcgaaagcctgattgatagggagtatctggagagagacaagaacaaccctcaaatatacaattaccttgcataa

SEQ ID NO: 13906 - protein, 789 aa, Glycine max
MSLPTKRSSTAGSSLSPPPPMKKAKSLLLRSSSDDHDAVLDPSSMPLDDDLPNARAANLARKKATPPQPAKKLLIKLHKAKPTLPTNFEEDTWAKLKSAIGAIFLKQPNSCDLEKLYQAVNDLCLYKMGGNLYQRIEKECEAHISAALQSLVGQSPDLVVFLSLVERCWQDLCDQMLMIRGIALYLDRTYVKQTANVRSLWDMGLQLFRKHLSLSPEVEHKTVTGLLRMIESERKGEAVDRTLLNHLLKMFTALGIYAESFEKPFLECTSEFYAAEGVKYMQQSDVPDYLKHVEIRLQEEHERCLIYLDASTRKPLIATAEKQLLERHIPAILDKGFAMLMDGNRIEDLQRMYSLFSRVNALESLRQAISSYIRRTGQGIVLDEEKDKDMVSSLLEFKASLDTTWEESFSKNEAFCNTIKDSFEHLINLRQNRPAELIAKFLDEKLRAGNKGTSEEELEGTLDKVLVLFRFIQGKDVFEAFYKKDLAKRLLLGKSASIDAEKSMISKLKTECGSQFTNKLEGMFKDIELSKEINESFKQSSQARTKLPSGIEMSVHVLTTGYWPTYPPMDVRLPHELNVYQDIFKEFYLSKYSGRRLMWQNSLGHCVLKAEFPKGKKELAVSLFQTVVLMLFNDAEKLSFQDIKDSTGIEDKELRRTLQSLACGKVRVLQKLPKGRDVEDDDSFVFNEGFTAPLYRIKVNAIQLKETVEENTSTTERVFQDRQYQVDAAIVRIMKTRKVLSHTLLITELFQQLKFPIKPADLKKRIESLIDREYLERDKNNPQIYNYLA

SEQ ID NO: 13907 - DNA, 2235 bp, Glycine max
  CDS (1)..(2235)
atgtccatgagtgagcgcaagactattgacctagatcaaggatgggattttatgcagaagggcattttgaagctgaagaacattctagaagggcttcccgagcctcagttcagctcggaggactatatgatgctatacacgaccatatacaatatgtgcactcagaagccgcctcatgactattcccaacaactgtatgacaagtacagggaatcgtttgaagaatacatcgtatcaacggtattaccttctttgagagagaagcatgatgaatttatgttaagagaacttgtgaaaaggtgggcaaaccataaaattatggttaggtggctttctcgtttctttcactacttggaccgctactttattgcccggaggtcacttccgccacttaatgaagttgggttgacttgcttccgtgatttgatttacaaggaactaaatgggaaagttagagatgcagttatttcactaattgatcaagaacgggagggagaacagattgatcgagctctattaaagaatgtattagacatatttgttgaaattggaatggggcaaatggatcactatgagaatgattttgaagctgccatgctcaaagacacttcttcttattattctcgaaaggcttcaaattggatcctagaagattcttgtcctgattatatgctcaaggctgaggagtgcttaaaacgggagaaagatagggttgctcattacttgcactctagtagcgagccaaagttattagagaaagttcaacatgagttgttatctgtgtatgcaaaccaactccttgagaaagagcactctggatgtcatgctttacttagagatgacaaggttgaagacttgtcaagaatgttcaggctattctctaaaatacctcgaggcttagatcctgtttccagtatatttaagcagcatgttaccactgaaggtatggctttggtgaagcatgctgaagatgcagctagcaacaaaaaggcagagaaaaaggatatcgtaggtctgcaggagcaggtttttgttcgcaaggtgattgagctgcatgacaagtacctggcatatgtgaatgattgtttccagaatcatactcttttccacaaggctcttaaagaggcttttgaggtcttttgcaacaaaggtgttgctggaagttcaagcgcagaactgcttgcctccttctgtgataacattcttaagaaaggaggaagtgaaaaattaagtgatgaagcaattgaagaaactcttgaaaaggtggtcaagctgcttgcctatattagtgacaaagacttgtttgctgaattctataggaagaagcttgctcgaaggctcctttttgacaagagtgccaatgatgatcatgagagaagtattttgacaaaattgaagcaacaatgtggtggacagtttacctcaaagatggaaggaatggttacagatttgacactggcaaaggagaatcaaactagctttgaggagtatttaagcaataatcccaatgcagaccctggcatagacttgacagttacagttctgactactggcttctggcctagttacaaatcttttgatctcaatcttcctgcagaaatgataaggtgtgttgaagttttcaaagaattttatcaaactaaaacgaagcacagaaaacttacatggatttattccttgggtacgtgtaatataagtgggaaatttgacccaaaaaccgtggagctgattgttacaacctaccaggcttcagcattactgctttttaattcgtctgatagactgagttactcagagataatgactcagttaaacttatctgacgatgatgttattagactgctccattccttatcatgtgccaagtacaagattctcaacaaggagccaaatacaaaaacaatattgtccactgattattttgaatttaattctaaatttactgacaaaatgaggagaatcaagattcctcttcctcctgtggatgagaagaaaaaggttattgaggatgttgacaaggacagaagatatgctattgatgcctcaattgtgcgtattatgaagagtagaaaagttttgggctaccaacaattagtcatggagtgtgttgagcagttaggtcgcatgtttaagcctgacgtcaaggctattaaaaagcggattgaagatttgatttctcgtgactacttggaaagagacaaagataatgctaatatgttcaagtacttggcttga

SEQ ID NO: 13908 - protein, 744 aa, Glycine max
MSMSERKTIDLDQGWDFMQKGILKLKNILEGLPEPQFSSEDYMMLYTTIYNMCTQKPPHDYSQQLYDKYRESFEEYIVSTVLPSLREKHDEFMLRELVKRWANHKIMVRWLSRFFHYLDRYFIARRSLPPLNEVGLTCFRDLIYKELNGKVRDAVISLIDQEREGEQIDRALLKNVLDIFVEIGMGQMDHYENDFEAAMLKDTSSYYSRKASNWILEDSCPDYMLKAEECLKREKDRVAHYLHSSSEPKLLEKVQHELLSVYANQLLEKEHSGCHALLRDDKVEDLSRMFRLFSKIPRGLDPVSSIFKQHVTTEGMALVKHAEDAASNKKAEKKDIVGLQEQVFVRKVIELHDKYLAYVNDCFQNHTLFHKALKEAFEVFCNKGVAGSSSAELLASFCDNILKKGGSEKLSDEAIEETLEKVVKLLAYISDKDLFAEFYRKKLARRLLFDKSANDDHERSILTKLKQQCGGQFTSKMEGMVTDLTLAKENQTSFEEYLSNNPNADPGIDLTVTVLTTGFWPSYKSFDLNLPAEMIRCVEVFKEFYQTKTKHRKLTWIYSLGTCNISGKFDPKTVELIVTTYQASALLLFNSSDRLSYSEIMTQLNLSDDDVIRLLHSLSCAKYKILNKEPNTKTILSTDYFEFNSKFTDKMRRIKIPLPPVDEKKKVIEDVDKDRRYAIDASIVRIMKSRKVLGYQQLVMECVEQLGRMFKPDVKAIKKRIEDLISRDYLERDKDNANMFKYLA

SEQ ID NO: 13909 - DNA, 2370 bp, Glycine max
  CDS (1)..(2370)
atgtctctccccaccaaacggtcgggcaccgctggttcctccctgtcgccgccacctcctatgaaaaaggccaagtccctcctcctccgctcctcctccgacgaccacgacgccgttttggacccttcctccatgcctctcgacgacgatctccccaatgcccgcgccgccaatctcgcccgcaagaaagccaccccgccccaacccgccaagaagctcctcatcaagctccacaaagctaaaccaacattgcccacaaatttcgaggaggatacatgggcaaaactaaagtctgccatttgtgctatatttttgaagcaacctaactcttgtgacttggagaagctttatcaggctgtgaacgatctctgcctttataaaatgggtggaaatctttatcaacggattgaaaaggagtgtgaagcacatatatctgctgcactgcagtctttggttggccaaagcccagatttggttgtttttctgtctctagttgagagatgttggcaggatctttgtgaccaaatgttgatgattcgtggtatagccttgtatctagataggacatatgtgaagcaaacagcaaatgtccgatcattatgggacatgggcttacaacttttccgcaaacatctttcattgtctcctgaagtagaacacaaaactgttacaggtcttctacgaatgattgaaagtgaaagaaaaggtgaagcagtggatagaactcttctaaaccaccttttgaagatgtttactgctctgggaatttatgcagaaagctttgagaagccattccttgaatgcacatctgaattttatgctgctgaaggtgtgaaatacatgcagcaatcagatgttccagattacttgaagcatgtggagataagattgcaagaagaacatgaaagatgtttgatctacttggatgcaagtactaggaagccattgatagcaacagcagaaaaacaacttcttgaacgtcatatacctgccattcttgataagggctttgcaatgcttatggatgggaatcgtattgaagaccttcagagaatgtactcactcttttcaagggtcaatgccctcgagtcattgaggcaggccattagttcatatatcaggagaactggtcagggcattgttttggacgaggagaaagataaggatatggtttcatcccttttggaatttaaggcttctcttgacacaacatgggaagaaagcttttccaagaatgaagcattctgtaacaccatcaaagattcgtttgagcatctcatcaatcttcgtcagaaccgacctgctgaattgattgccaagtttttggatgagaaacttcgtgcaggtaacaagggcacttcagaagaagagttggagggtacacttgataaagtccttgttttattcaggttcattcagggcaaggatgtgtttgaggcattttataagaaagatcttgcaaaaagactgttgttgggaaagagtgcttctattgatgcagagaaatctatgatctccaagttgaagaccgagtgtggcagccagttcacaaacaaactagaagggatgtttaaggacattgaattatcaaaagaaataaacgagtccttcaaacagtcatcccaggctaggacaaaactcccatccgggattgaaatgagtgttcatgttttgacaactgggtactggccgacgtatccacccatggatgttagacttcctcatgaattgaatgtttaccaggatattttcaaagagttctatctaagtaaatatagtggaaggcgtctgatgtggcaaaattcattaggtcactgtgtcttaaaggcagagtttcctaaagggaaaaaagagttggctgtctccctatttcagactgttgttctgatgttattcaatgatgctgagaaactaagctttcaagatatcaaggactctactggtatagaggacaaggaactgagaaggactctgcaatcacttgcatgtggaaaagttcgtgtcctacaaaagttgccaaagggtagagatgtggaggatgatgactcatttgtttttaatgaagggtttacagctcctctttatcgtataaaggtgaatgcaattcagttgaaggagacagtagaggagaacacaagcaccactgaaagagttttccaagaccgtcaatatcaggttgatgctgctattgtgaggataatgaagactaggaaagtgcttagtcacacgcttcttattactgaactcttccaacagctcaaatttccaataaaaccagctgacttgaagaaaaggatcgaaagcctgattgatagggagtatctggagagagacaagaacaaccctcaaatatacaattaccttgcataa

SEQ ID NO: 13910 - protein, 789 aa, Glycine max
MSLPTKRSGTAGSSLSPPPPMKKAKSLLLRSSSDDHDAVLDPSSMPLDDDLPNARAANLARKKATPPQPAKKLLIKLHKAKPTLPTNFEEDTWAKLKSAICAIFLKQPNSCDLEKLYQAVNDLCLYKMGGNLYQRIEKECEAHISAALQSLVGQSPDLVVFLSLVERCWQDLCDQMLMIRGIALYLDRTYVKQTANVRSLWDMGLQLFRKHLSLSPEVEHKTVTGLLRMIESERKGEAVDRTLLNHLLKMFTALGIYAESFEKPFLECTSEFYAAEGVKYMQQSDVPDYLKHVEIRLQEEHERCLIYLDASTRKPLIATAEKQLLERHIPAILDKGFAMLMDGNRIEDLQRMYSLFSRVNALESLRQAISSYIRRTGQGIVLDEEKDKDMVSSLLEFKASLDTTWEESFSKNEAFCNTIKDSFEHLINLRQNRPAELIAKFLDEKLRAGNKGTSEEELEGTLDKVLVLFRFIQGKDVFEAFYKKDLAKRLLLGKSASIDAEKSMISKLKTECGSQFTNKLEGMFKDIELSKEINESFKQSSQARTKLPSGIEMSVHVLTTGYWPTYPPMDVRLPHELNVYQDIFKEFYLSKYSGRRLMWQNSLGHCVLKAEFPKGKKELAVSLFQTVVLMLFNDAEKLSFQDIKDSTGIEDKELRRTLQSLACGKVRVLQKLPKGRDVEDDDSFVFNEGFTAPLYRIKVNAIQLKETVEENTSTTERVFQDRQYQVDAAIVRIMKTRKVLSHTLLITELFQQLKFPIKPADLKKRIESLIDREYLERDKNNPQIYNYLA

SEQ ID NO: 13911 - DNA, 2241 bp, Hordeum vulgare
  CDS (1)..(2241)
atggcgggacacgggcaggaccgcaagacgatcgatctggaggatgggtgggcgttcatgcagcgggggatcaccaagctcatcaacatcctcgagggcaagccggagccacagttcagctccgaggactacatgatgctctacacgacgatatacaacatgtgcacgcagaagcccccgcacgactattcgcagcagctctatgacaagtaccgcgaggccttcgaggagtacatccgggccacggtcttgccatcattaaaagagaagcatgatgagtttatgctcagagagctggtacaaaggtggtcaaaccataaagttatggttaggtggctttcacgctttttccattatctcgaccggtacttcatcacacggaggtcccttactgcacttagagatgttgggcttatttgcttccgagacctgatatttgaagagatcaaagggaaggtaaaagatgcggtgatagctctgatcgatcaagagcgtgaaggtgaacagattgacagggccttgctgaagaacgtcttggatatattcgttgagattgggttaggtaatatggattgttacgagaatgacttcgaagatttcttgcttaaggatactacagattactactctgtcaaagctcaaagctggattgttgaggattcttgtcctgattacatgataaaggctgaagagtgcctgaaaagagagaaggagcgagttggtcactacttgcatattaatagtgagccgaagttgctggagaaattgcaaaatgaattgcttgccaattatgcaacacaacttttggagaaggagcattctggatgttttgcattgcttcgggatgataaggttgaggatctttcaaggatgtacagactcttctcaaaaatcaaccgcggtctggatcctatttctaacatgtttaaaacgcatgttacgaatgagggtacagccttggtcaagcaagcagaagattctgctaataacaagaagccagagaagaaggaggttgttggcatgcaggaacaggtgtttgtctggaaaatcattgagctgcatgacaagtatgtagcatatgtgacagattgttttcagggccatacactctttcacaaggcacttaaagaagcctttgaggtcttctgcaataagggtgtctctggcagttccagtgctgaattacttgccaccttctgtgacaacattttgaagaaaggctgcagtgagaagctcagcgatgaagccattgaggatgctcttgagaaggtggttcggttgcttgcgtatgttagtgataaagatctctttgccgagttctacaggaagaagcttgcaagaagattgctttttgacaagagcgccaatgatgaacatgaaagaagcatcctgacaaagctcaagcagcagtgcggtgggcagttcacttcaaaaatggagggcatggttaccgaccttgctgttgcaagagatcatcaaactaagtttgaagagttcgtagctgatcatccggagtcaaatcctggggtagacttggctgtcactgtcttgacaacaggattctggccaacctacaaaacttttgacataaaccttccctctgagatggtgaaatgcgtagaggtttttaaggaattctacgcaacaagaacaaagcacaggaagcttacctggatatactccttgggaacctgcaatatcagtgcaaaatttgatgctaaaactatagagctcattgttacaacgtatcaggctgcgttgctgttgttgttcaatggatctactaagcttagttactctgagattgtaacacagctgaacctttcagatgatgatgttgtccgtttgctccattctctctcttgtgcgaaatacaagattcttagcaaagaaccagctggtagaactatttcgcccaatgattcttttgagttcaattcaaaatttactgacaggatgagaaggatcaagatacccctacctcctgtcgatgagaagaaaaaggtggttgaggatgttgacaaggaccggaggtatgcaattgatgcatcaattgtgcgtatcatgaaaagtcgcaaagttatggcccatacacagctagttgcggaatgtgtggagcagctcagccgcatgttcaagcctgacttcaaagcaatcaagaagaggattgaagatctcatcacgagggattacctcgagcgggacaaggacaacgccaacacatacagatatctggcttaa

SEQ ID NO: 13912 - protein, 746 aa, Hordeum vulgare
MAGHGQDRKTIDLEDGWAFMQRGITKLINILEGKPEPQFSSEDYMMLYTTIYNMCTQKPPHDYSQQLYDKYREAFEEYIRATVLPSLKEKHDEFMLRELVQRWSNHKVMVRWLSRFFHYLDRYFITRRSLTALRDVGLICFRDLIFEEIKGKVKDAVIALIDQEREGEQIDRALLKNVLDIFVEIGLGNMDCYENDFEDFLLKDTTDYYSVKAQSWIVEDSCPDYMIKAEECLKREKERVGHYLHINSEPKLLEKLQNELLANYATQLLEKEHSGCFALLRDDKVEDLSRMYRLFSKINRGLDPISNMFKTHVTNEGTALVKQAEDSANNKKPEKKEVVGMQEQVFVWKIIELHDKYVAYVTDCFQGHTLFHKALKEAFEVFCNKGVSGSSSAELLATFCDNILKKGCSEKLSDEAIEDALEKVVRLLAYVSDKDLFAEFYRKKLARRLLFDKSANDEHERSILTKLKQQCGGQFTSKMEGMVTDLAVARDHQTKFEEFVADHPESNPGVDLAVTVLTTGFWPTYKTFDINLPSEMVKCVEVFKEFYATRTKHRKLTWIYSLGTCNISAKFDAKTIELIVTTYQAALLLLFNGSTKLSYSEIVTQLNLSDDDVVRLLHSLSCAKYKILSKEPAGRTISPNDSFEFNSKFTDRMRRIKIPLPPVDEKKKVVEDVDKDRRYAIDASIVRIMKSRKVMAHTQLVAECVEQLSRMFKPDFKAIKKRIEDLITRDYLERDKDNANTYRYLA

SEQ ID NO: 13913 - DNA, 2211 bp, Oryza sativa
  CDS (1)..(2211)
atgagcgggggcgggccgccgaagaagcgcaacttcaagatcgagctgttcaagcaccgcgtggagctcgaccccaagtacgcggagcggacatggaagaacctcgagcacgccatccacgagatctacaaccacaacgccagtggcctctccttcgaggagctctacaggagtgcctacaacatggtgctccacaagtatggtgagaagctatatgatggcctggagagaactatgacatggcgcttgaaggaaatatcaaaatcaatagaggctgcacagggtggtttgtttctggaggagctgaatgccaagtggatggatcacaataaggcattgcagatgatccgagatattctaatgtacatggatcgaacatatgtcccgcaatcccgtagaacacctgttcatgagcttggtttgaatttgtggagggatcacataattcactctcccatgattcatagtcggctgcttgatacccttctggatcttattcacagggagagaatgggtgaaatgattaacagaggcctgatgaggagcataacgaaaatgttaatggatcttggtgctgctgtatatcaagatgactttgagaagccgtttttggatgttacagctagcttctacagtggagagtctcaggagttcattgagtgctgtgactgtgggaactatcttaagaagtccgagagacgtctcaatgaggaaatggaacgtgtctcacactacttggatgctggcactgaggcaaagataactagtgtggttgagaaagaaatgattgccaatcacatgcatagattggttcatatggaaaactcaggccttgtaaatatgcttgtagatgacaaatatgacgacttggctaggatgtacaacttattccgaagggtttttgatgggctatcgacaatcagagatgtgatgacttcatacctaagggaaacagggaagcagttagtgacagatcctgagaggttgaaagacccagtggaatttgttcagcgcttgttaaatgagaaggacaagcatgataagatcatcaacgttgcttttggcaatgacaaaactttccagaatgctctaaattcatcctttgagtacttcatcaacttaaacaacaggtcacctgaattcatatcgttgtatgttgatgataaacttcggaaaggattgaaaggagccacagaagaggatgtggaggttattctggacaaagtcatgatgctgtttcggtacctccaggagaaggatgtatttgagaagtactacaagcagcatttggcgaaaagactattgtctggcaaaactgtttctgatgatgctgagaggagtatgatagttaaactcaagacagaatgtgggtaccagttcacttccaaattagagggcatgttcactgacatgaagacctctcaggacactatgatagacttttatgccaagaagtctgaggaacttggcgatggcccaacacttgatgtccacattcttacaactggttcttggccaacacagccctgccctccctgcaaccttccaactgaaatccttgcaatatgtgataagttccggacatactaccttggaactcacagtggccggagattgacatggcaaacaaacatgggaacagctgacataaaagccacatttgggaaaggtcagaagcatgaactaaatgtatccacttatcagatgtgtgttctcatgctgtttaattctaccgatgggttaacctacaaagacatcgaacaagatactgcgatacctgcctcggatctaaagagatgccttcaatctcttgcttgtgtcaaggggaagaatgttctccgcaaggaacccatgagcaaagatatatcggaggatgacacattctacttcaacgacaagttcacaagcaagcttgttaaggtcaagattgggacagtagtggcgcaaaaggaatctgagccagagaaacaagagactcgtcaacgggttgaggaggacaggaaacctcaaattgaggctgctatcgtcaggattatgaaatccaggagggtcttggatcataacagcattgtagctgaggttaccaagcaattgcaagcccgattcatgccgaatcctgttgtcataaagaaacgcatagaatctctaattgagcgtgaattcttagagagggacaaagcagataggaagttatatcgctatcttgcatag

SEQ ID NO: 13914 - protein, 736 aa, Oryza sativa
MSGGGPPKKRNFKIELFKHRVELDPKYAERTWKNLEHAIHEIYNHNASGLSFEELYRSAYNMVLHKYGEKLYDGLERTMTWRLKEISKSIEAAQGGLFLEELNAKWMDHNKALQMIRDILMYMDRTYVPQSRRTPVHELGLNLWRDHIIHSPMIHSRLLDTLLDLIHRERMGEMINRGLMRSITKMLMDLGAAVYQDDFEKPFLDVTASFYSGESQEFIECCDCGNYLKKSERRLNEEMERVSHYLDAGTEAKITSVVEKEMIANHMHRLVHMENSGLVNMLVDDKYDDLARMYNLFRRVFDGLSTIRDVMTSYLRETGKQLVTDPERLKDPVEFVQRLLNEKDKHDKIINVAFGNDKTFQNALNSSFEYFINLNNRSPEFISLYVDDKLRKGLKGATEEDVEVILDKVMMLFRYLQEKDVFEKYYKQHLAKRLLSGKTVSDDAERSMIVKLKTECGYQFTSKLEGMFTDMKTSQDTMIDFYAKKSEELGDGPTLDVHILTTGSWPTQPCPPCNLPTEILAICDKFRTYYLGTHSGRRLTWQTNMGTADIKATFGKGQKHELNVSTYQMCVLMLFNSTDGLTYKDIEQDTAIPASDLKRCLQSLACVKGKNVLRKEPMSKDISEDDTFYFNDKFTSKLVKVKIGTVVAQKESEPEKQETRQRVEEDRKPQIEAAIVRIMKSRRVLDHNSIVAEVTKQLQARFMPNPVVIKKRIESLIEREFLERDKADRKLYRYLA

SEQ ID NO: 13915 - DNA, 2199 bp, Triticum aestivum
  CDS (1)..(2199)
atgaatccccagcggaagcgcatccccaagatcgagcccttcaagcaccgggtcgaggtcgaccccaagttcttcgacaagtcgtggaagaagctcgatgacgccatccgcgagatttacaaccacaacgccagcggcctctccttcgaggagctctacaggaccgcatataacatggttcttcacaagcatggtgggaggctctacgataaattggcagagaacttgaaaggacaccttagagaaatgggcaaattagtagaggctgcccaaggtggtttgttcttggaggagctacagagaaggtgggctgatcatatcaaggcattacagatgatcagagatattctgatgtatatggatagaacatttattccatctagcaaaaagacacctgtctttgaacatggtctagaactgtggagagatattgttgtccgctcccccaaaattcatgggagattggtcgacacacttctggaactcattcatagagagaggatgggtgagatgataaacagaggtttgatgaggaacacaaccaagatgctgatggaactggggtcgtctgtctaccaggatgactttgagaggccattccttgaggtgtctgcaagtttctatagtggtgagtcgcagcagtgcatcgagcgttgcgactgtggtgagtacctgaagaatgccgagaagcggcttgctgaggaatctgaacgtgtttcgctgtatatggacgccaaaactgcagacaagatagctaatgttgtggacaaagagatgctctcgattcacatgcagaggttgtttcttatggagaattctggtcttgtgaatatgctcattaatgacaagcatgaagacctgaccaggatgtatgacttgtttaaacgtgtccctgatgggcattcaaccattagatctctcatggcttctcatgtcaaggagactggaaagattttggtgactgacccagagagattaagggaccctgttgatttcgtccagcgtcttctaaatgagaaggacaagtatgatgagattgtcagtgtttcattcagcaatgaaaagactttccagaatgctttgaatgcctcatttgagcatttcatcaacttaaacaaccgctcccctgagttcatatcattgtatgttgatgacaagcttcggaaaggtgtgaaaggtgctgccaatgaagaggatattgagacagttctggacaaggttatgatgctgttcaggtacttgcaggagaaagatgtttttgagaagtataacaagcagcacttggcaaaacgccttctatctgggaaaactagttctgatgaagctgagaggaacatgcttgtgaagctcaagacagaatgtggctaccagtttacgtcaaagctggaaagcatgttcactgatttgaagacgtctcaggatacgatgcaaagtttctatgccaatctcgctggtgatgctgatgtcccaacaatatctgtccagatactcaccactggatcctggccaacacaaccatgcgctacatgcaatcttccacctgagatccttggtgtttctgagcagttccgggcacactacctgggcacgcacaatggcaggagactgacatggcagacaaatatggggaatgcagacatcaaggcaacatttggagaccgcaagcatgagctgaatgtctcaacttaccagatgtgtgtcctgatgctatttaactcaacagatagtttgacctacaaggaaattgagcaggccacagccataccacctgttgatctgaagcgctgcctccagtctcttgcctgtgtgaagggcaagaacgtgctgcggaaggagcccatgagcaaggacatatccgacagcgacgctttccacttcaacgacaagttcagcagcaagttggtgaaggtgaagattggcacggtggttgcacagaaggagtcagagccagagaagcaggagacccgccacagggtcgaggaggaccggaagccccagatcgaggcagccatcgtgaggatcatgaagtccaggagggtcctggaccacaacagcatagtgacggaggtgacgaagcagctccaggcgcgcttcctgcccaacccggtggtgatcaagaagaggatcgagtccctgatcgagcgcgagttcctggagagggacaaggtagataggaagctctaccgctatctcgcgtaa

SEQ ID NO: 13916 - protein, 732 aa, Triticum aestivum
MNPQRKRIPKIEPFKHRVEVDPKFFDKSWKKLDDAIREIYNHNASGLSFEELYRTAYNMVLHKHGGRLYDKLAENLKGHLREMGKLVEAAQGGLFLEELQRRWADHIKALQMIRDILMYMDRTFIPSSKKTPVFEHGLELWRDIVVRSPKIHGRLVDTLLELIHRERMGEMINRGLMRNTTKMLMELGSSVYQDDFERPFLEVSASFYSGESQQCIERCDCGEYLKNAEKRLAEESERVSLYMDAKTADKIANVVDKEMLSIHMQRLFLMENSGLVNMLINDKHEDLTRMYDLFKRVPDGHSTIRSLMASHVKETGKILVTDPERLRDPVDFVQRLLNEKDKYDEIVSVSFSNEKTFQNALNASFEHFINLNNRSPEFISLYVDDKLRKGVKGAANEEDIETVLDKVMMLFRYLQEKDVFEKYNKQHLAKRLLSGKTSSDEAERNMLVKLKTECGYQFTSKLESMFTDLKTSQDTMQSFYANLAGDADVPTISVQILTTGSWPTQPCATCNLPPEILGVSEQFRAHYLGTHNGRRLTWQTNMGNADIKATFGDRKHELNVSTYQMCVLMLFNSTDSLTYKEIEQATAIPPVDLKRCLQSLACVKGKNVLRKEPMSKDISDSDAFHFNDKFSSKLVKVKIGTVVAQKESEPEKQETRHRVEEDRKPQIEAAIVRIMKSRRVLDHNSIVTEVTKQLQARFLPNPVVIKKRIESLIEREFLERDKVDRKLYRYLA

SEQ ID NO: 13917 - DNA, 2220 bp, Zea mays
  CDS (1)..(2220)
atgttgaacggcggcggcggcggccagaagaagcggaacacgaagatcgagccctaccggcaccgcgtcgagaccgaccccaagttcttcgacaagtcgtggcggaagctccatgacgccatccgcgagatctacaaccacaacgccagcggtctctccttcgaggagctctacaggactgcttataacatggtattgaacaagtttgctcctcagctctatgagaaactcacagaaaacatgaaagggcatcttgaagagatgcgcacatgtatagaggctgctcaaggtggtttgttcctggaagagttgcagcgaaaatggaatgaccataacaaggcattgacaatgattagagatatcctgatgtatatggacaggacatatattcccactaataaaaagacacctgtcttcgaacatggattagagctttggagggatactatagttcggtctcctatgattcaggggaggttgtttgacacgcttctcgagctcatacatagagaaaggactggcgacgtgataaatagaggcttgatgaggactacaactaaaatgttgatggatctagggttgtctgtttaccaggatgattttgaaaggccatttcttgaggtctctgctagtttctatagtggtgagtcacaacaatttattgaatgctgtacttgtggtgagtatctgaagcaggctgagaggcgcctccatgaagaatcagagcgtgtgtcacagtacttggatgctaaaaccaatgagaaaattactgctgttgtggtgaaagagatgctagcaaatcacatgcagaggttgattcttatggagaactcagggcttgtgaatatgcttgtcgaagacaggtatgaagacctgacaaggatgtacactttgtttaatcatgttcctgatgggctcacaacaattagatctgtgatgacgtctcatattaaggatactggcaaaagtttggtaacagatccagagagactaaaggacccagttgattttgttcagcggcttcttaacatgaaggacaagtatgacaatatcatcaatgtgtcattcagcaacgacaagagtttcctgaatgctctcaattcctcatttgagaacgttataaacttaaacaacagatcacctgagttcatatcactgtttgttgatgacaaactgcggaagggggtgaaagaggccaatgaggaggatcttgaaactgtcctggacaaagtgatgacgctgtttaggtatttgcaagaaaaagatctatttgagaaatattacaagcaacacttggcaaagcgtcttctttctgggaaggctgcttctgatgattctgagagaagcatgcttgtgaagctgaagacagaatgtggctaccagtttacttcaaagttggagggcatgttcactgatttgaagacctctcaggatactacacaagggttttatgcatctacttcctcggagctgccggcagatgcccccacaatgtctgtccagatactcacaactgggtcatggccaacgcaaacctgcaatacctgcaatctcccccctgaaattgtttctgtctcagagaagtttcggtcttattaccttggcacacataatggcaggaggctaacatggcaaacaaacatggggacggctgacatcaaagtaacatttggaaatggaagcaagcatgaactgaacgtatcaacataccagatgtgtgttctcatgctgtttaactcagcagatgtcttgacttaccgtgaaattgagcagtctacagcaataccagccgctgacctgaagcgatgcctccagtcactagctcttgtgaagggtaagcaagtcctgcggaaagagccgatgagcagggacattgccgatgatgacagcttctgcgtgaacgacaagttcaccagcaagctcttcaaggtgaagatcggcaccgtggtggcgcagaaggagaccgaccccgagaagctagagacgcggcagcgggtggaggaggacaggaagccgcagatcgaggcggccattgtgcggatcatgaagtcgaggagggtcctcgaccacaacagcatcatgacggaggtgacaaagcagctgcagccgcgtttcatgccgaatcccgtggtgatcaagaagcggatcgagtcgctcatcgaacgcgacttcctggagcgggacaagacagacaggaagatgtatcgctatctggcctaa

SEQ ID NO: 13918 - protein, 739 aa, Zea mays
MLNGGGGGQKKRNTKIEPYRHRVETDPKFFDKSWRKLHDAIREIYNHNASGLSFEELYRTAYNMVLNKFAPQLYEKLTENMKGHLEEMRTCIEAAQGGLFLEELQRKWNDHNKALTMIRDILMYMDRTYIPTNKKTPVFEHGLELWRDTIVRSPMIQGRLFDTLLELIHRERTGDVINRGLMRTTTKMLMDLGLSVYQDDFERPFLEVSASFYSGESQQFIECCTCGEYLKQAERRLHEESERVSQYLDAKTNEKITAVVVKEMLANHMQRLILMENSGLVNMLVEDRYEDLTRMYTLFNHVPDGLTTIRSVMTSHIKDTGKSLVTDPERLKDPVDFVQRLLNMKDKYDNIINVSFSNDKSFLNALNSSFENVINLNNRSPEFISLFVDDKLRKGVKEANEEDLETVLDKVMTLFRYLQEKDLFEKYYKQHLAKRLLSGKAASDDSERSMLVKLKTECGYQFTSKLEGMFTDLKTSQDTTQGFYASTSSELPADAPTMSVQILTTGSWPTQTCNTCNLPPEIVSVSEKFRSYYLGTHNGRRLTWQTNMGTADIKVTFGNGSKHELNVSTYQMCVLMLFNSADVLTYREIEQSTAIPAADLKRCLQSLALVKGKQVLRKEPMSRDIADDDSFCVNDKFTSKLFKVKIGTVVAQKETDPEKLETRQRVEEDRKPQIEAAIVRIMKSRRVLDHNSIMTEVTKQLQPRFMPNPVVIKKRIESLIERDFLERDKTDRKMYRYLA

SEQ ID NO: 13919 - DNA, 2220 bp, Zea mays
  CDS (1)..(2220)
atgttgaacggcggcggcggcggccagaagaagcggaacacgaagatcgagccctaccggcaccgcgtcgagaccgaccccaagttcttcgacaagtcgtggcggaagctccatgacgccatccgcgagatctacaaccacaacgccagcggtctctccttcgaggagctctacaggactgcttataacatggtattgaacaagtttgctcctcagctctatgagaaactcacagaaaacatgaaagggcatcttgaagagatgcgcacatgtatagaggctgctcaaggtggtttgttcctggaagagttgcagcgaaaatggaatgaccataacaaggcattgacaatgattagagatatcctgatgtatatggacaggacatatattcccactaataaaaagacacctgtcttcgaacatggattagagctttggagggatactatagttcggtctcctatgattcaggggaggttgtttgacacgcttctcgagctcatacatagagaaaggactggcgacgtgataaatagaggcttgatgaggactacaactaaaatgttgatggatctagggttgtctgtttaccaggatgattttgaaaggccatttcttgaggtctctgctagtttctatagtggtgagtcacaacaatttattgaatgctgtacttgtggtgagtatctgaagcaggctgagaggcgcctccatgaagaatcagagcgtgtgtcacagtacttggatgctaaaaccaatgagaaaattactgctgtcgtggtaaaagagatgctagcaaatcacatgcagaggttgattcttatggagaactcagggcttgtgaatatgcttgtcgaagacaggtatgaagacctgacaaggatgtacactttgtttaatcatgttcctgatgggctcacaacaattagatctgtgatgacgtctcatattaaggatactggcaaaagtttggtaacagatccagagagactaaaggacccagttgattttgttcagcggcttcttaacatgaaggacaagtatgacaatatcatcaatgtgtcattcagcaacgacaagagtttcctgaatgctctcaattcctcatttgagaacgttataaacttaaacaacagatcacctgagttcatatcactgtttgttgatgacaaactgcggaagggggtgaaagaggccaatgaggaggatcttgaaactgtcctggacaaagtgatgacgctgtttaggtatttgcaagaaaaagatctatttgagaaatattacaagcaacacttggcaaagcgtcttctttgtgggaaggctgctcctgaggattctgagcgaagcatgcttgtgaagctgaagacggaatgtggctaccagtttacttcaaagttggagggcatgttcactgatttgaatacctctcaggatactacacaagggttttatgcatctacttcttcggggctgctggcagatgcccccacaatgtctgtccagatactcaccactgggtcatggccaacgcaaacctgcaatacctgtaatcttccccctgaaattgtttctgtctcagagaagtttcggtcttattaccttggcacacataatggcaggaggctaacatggcaaacaaacatggggactgctgacatcaaagtaacatttggaaatggcagcaagcatgaactgaacgtctcaacataccagatgtgtgttctcatgctgtttaattcatcagatgtcttgacttaccgtgaaattgagcagtctacagcaataccagccgctgacctgaagcgatgcctccagtcgctagctcttgtgaagggtaagcaagtcctgcggaaagagccgatgagcagggacattgccgatgatgacagcttctgcgtgaacgacaagttcaccagcaagctcttcaaggtgaagatcggcaccgtggtggcgcagaaggagaccgaccccgagaagctagagacgcggcagcgggtggaggaggacaggaagccgcagatcgaggcggccattgtgcggatcatgaagtcgaggagggtcctcgaccacaacagcataatgacggaggtgacaaagcagttgcagccccgtttcatgccaaaccccgtggtgatcaagaagcggatcgagtcgctcatcgagcgcgagttcctggagcgggacaaggtggacaggaagatgtaccgctatcttgcctaa

SEQ ID NO: 13920 - protein, 739 aa, Zea mays
MLNGGGGGQKKRNTKIEPYRHRVETDPKFFDKSWRKLHDAIREIYNHNASGLSFEELYRTAYNMVLNKFAPQLYEKLTENMKGHLEEMRTCIEAAQGGLFLEELQRKWNDHNKALTMIRDILMYMDRTYIPTNKKTPVFEHGLELWRDTIVRSPMIQGRLFDTLLELIHRERTGDVINRGLMRTTTKMLMDLGLSVYQDDFERPFLEVSASFYSGESQQFIECCTCGEYLKQAERRLHEESERVSQYLDAKTNEKITAVVVKEMLANHMQRLILMENSGLVNMLVEDRYEDLTRMYTLFNHVPDGLTTIRSVMTSHIKDTGKSLVTDPERLKDPVDFVQRLLNMKDKYDNIINVSFSNDKSFLNALNSSFENVINLNNRSPEFISLFVDDKLRKGVKEANEEDLETVLDKVMTLFRYLQEKDLFEKYYKQHLAKRLLCGKAAPEDSERSMLVKLKTECGYQFTSKLEGMFTDLNTSQDTTQGFYASTSSGLLADAPTMSVQILTTGSWPTQTCNTCNLPPEIVSVSEKFRSYYLGTHNGRRLTWQTNMGTADIKVTFGNGSKHELNVSTYQMCVLMLFNSSDVLTYREIEQSTAIPAADLKRCLQSLALVKGKQVLRKEPMSRDIADDDSFCVNDKFTSKLFKVKIGTVVAQKETDPEKLETRQRVEEDRKPQIEAAIVRIMKSRRVLDHNSIMTEVTKQLQPRFMPNPVVIKKRIESLIEREFLERDKVDRKMYRYLA

SEQ ID NO: 13921 - DNA, 2235 bp, Zea mays
  CDS (1)..(2235)
atggcagggcaggagcgtaggacaatcgatctggaggagggatgggcgtttatgcagaagggtatcaccaagctgaagaacatcctcgagggcaagcccgagcctcagttcagctccgaggactacatgatgctctacacgacgatatacaacatgtgcacgcagaagccgccgcacgactactcgcagcagctctacgacaagtatcgggagtcgttcgaggagtatatcacctccatggtactaccttcgctaagggagaaacatgatgagtttatgctgagggagctagtgcaaaggtggtcaaaccataaagtcatggttcgttggctctcgcgtttctttcattaccttgaccggtacttcatatcaaggaggtcacttaccccacttaaagaagttggtcttacttgcttccgagagttgatatatcaagagattaaagggcaagttaaagatgcggtgatagctctgatagacaaagaacgcgagggtgaacagattgaccggggtctgttgaagaatgtattggatatttttgttgaaattgggctgggtcaaatggagtgttatgagaatgactttgaagatttcttgctcaaggatactacagagtactactctgtcaaagctcaaagctggattcttgaggactcatgcccagattacatgattaaggctgaggagtgtttaaagcgggagaaggagcgagttggtcactatttgcatattagcagcgaacagaagttattggagaaagtgcaaaatgaattgcttgctcagtatgcaaccccgctgttagagaaggagcattctggatgttctgctttgcttcgcgatgacaaggttgaggacctttctaggatgtacagactcttctccaaaatctcccgtggtctggagcctatttcaaacatgttcaaaacgcatgtcacaagtgagggtacagccttggtcaagcaagcagaagattctgctagtaataagaagccagagaagaaggatatggttggcatgcaggaacaggtctttgtgtggaaaatcatcgagctgcatgacaaatatgtagcttatgtgacagaatgtttccagggacatacactcttccataaggcacttaaagaagcctttgaggtcttctgtaacaaaggtgtctctggcagttcgaatgctgagttgttggctaccttctgcgacaatattctgaagaaaggctgcagtgaaaagctcagtgatgaagccattgaagatgcccttgagaaggttgtgagattgctggcatacatcagtgataaagacctgtttgccgagttctataggaagaaacttgccagaagattacttttcgacaaaagtgctaatgatgagcatgagagaagtattctgacaaagctcaagcaacagtgcggggggcagtttacttccaaaatggagggcatggttacggaccttactgtcgctagagatcaccaaactaagtttgaagagtttgtagctgggcatccagagttgaatcctggcatagatttggctgttactgttttgacaacgggattctggccaagctacaaaacttttgacataaaccttcctgcggagatggtgaaatgtgtagaggttttcaaggaattctatcaaacaagaacgaagcacaggaagctgacatggatttattccttgggaacctgcaacatcaatgctaagtttgatgctaaacctattgagctcattgttacgacatatcaggctgcattactactactgttcaatggatccgaaaggcttagttattctgaaattgcaacacaattaaacctgtcagatgatgatgtagtgcgtttgctccattcactttcttgtgcaaaatacaagatccttaacaaggaaccagcaaatagatccatctcgcccaatgatgtttttgagttcaattcaaaatttactgacagaatgagaagaattaagattccactgcctcccgttgatgagaagaaaaaggttgttgaagatgttgacaaagacaggaggtatgcaattgatgcatcaattgtgcgcattatgaagagccgcaaagttatgggtcatcaacagctggttgctgaatgtgttgagcagcttagccgcatgtttaagccggacttcaaagccataaagaagaggattgaggatctcatcacaagggactatttggagcgcgacaaggacaacgccaatacgtacaaataccttgcctga

SEQ ID NO: 13922 - protein, 744 aa, Zea mays
MAGQERRTIDLEEGWAFMQKGITKLKNILEGKPEPQFSSEDYMMLYTTIYNMCTQKPPHDYSQQLYDKYRESFEEYITSMVLPSLREKHDEFMLRELVQRWSNHKVMVRWLSRFFHYLDRYFISRRSLTPLKEVGLTCFRELIYQEIKGQVKDAVIALIDKEREGEQIDRGLLKNVLDIFVEIGLGQMECYENDFEDFLLKDTTEYYSVKAQSWILEDSCPDYMIKAEECLKREKERVGHYLHISSEQKLLEKVQNELLAQYATPLLEKEHSGCSALLRDDKVEDLSRMYRLFSKISRGLEPISNMFKTHVTSEGTALVKQAEDSASNKKPEKKDMVGMQEQVFVWKIIELHDKYVAYVTECFQGHTLFHKALKEAFEVFCNKGVSGSSNAELLATFCDNILKKGCSEKLSDEAIEDALEKVVRLLAYISDKDLFAEFYRKKLARRLLFDKSANDEHERSILTKLKQQCGGQFTSKMEGMVTDLTVARDHQTKFEEFVAGHPELNPGIDLAVTVLTTGFWPSYKTFDINLPAEMVKCVEVFKEFYQTRTKHRKLTWIYSLGTCNINAKFDAKPIELIVTTYQAALLLLFNGSERLSYSEIATQLNLSDDDVVRLLHSLSCAKYKILNKEPANRSISPNDVFEFNSKFTDRMRRIKIPLPPVDEKKKVVEDVDKDRRYAIDASIVRIMKSRKVMGHQQLVAECVEQLSRMFKPDFKAIKKRIEDLITRDYLERDKDNANTYKYLA

SEQ ID NO: 13923 - DNA, 2499 bp, Zea mays
  CDS (1)..(2499)
atgtctcagccccacgccgccgctcccgcctcgaagcgccccttctcgtccaccaccacatccccgtctccgacgtcctcccctgcgacgccgcttatgaagaaggccaagcacccggccgccaccgcctcctccgttgggacggtcgagaagaacggtatccatcttgataccgccgccgccgccgccacgggcgggggccgaacgaacggcgaggaggatgcggaaatggtgctcgtggaccaagatgagctccccgcgcccagcgcgccggcctccgcgggcgttgccgccaacctcttccgaaagaaggccacgcttccgcagccgtcgacctccgcccgcaagcccctccgcatcagaataggtcaaccaaaactgccaaaaaacttcgaagaggatacatggacgattttgaaggatgctatcacagctatttttctcaagcagaaactttcttgtgatgttgagaaactctatcaggctgctggtgatctttgtctacacaagctaggggcaaacctatacgaacgaatcaagaaagaatgtgaaatacacatagctgaaaagatatcagcattagtgggccaaagcccagatttggttgtatttttgtctctggtccaaagaacatggcaagatttttgtgatcagatgttgattattcgcggtattgctttacttcttgatgtaaaatatgtcaagaatgtagcaaatatttgttcagtatgggatatggggctgcagctgtttcgcaagcatctatcactatccccagagattgaacacaaaactgtaactggccttctcagattgattgagagtgagaggcttggtgaagcaatagataggacattacttagtcatcttttgaagatgcttaccgctcttggaatgtattctgagagttttgaaaagccctttcttgagtgcacttctgaattttatgctacggaaggtgttaaatatatgcaacaatctgatattccagactacctgaagcatgtagagtcgaggttgcaagaagaacatgaaaggtgcattctatatttggaagctaacacgaggaagccactgatcgcaactactgaaaagcaattgctagaacgtcatacatctgcaattattgagaaggggttcactatgctcatggatgcaaatcgtataaatgacctctcgaggatgtacaaccttttccagagggtgaatgctgttgagctgctaaaactagcgcttagttcatatatccgggctacaggccagggcattattatggatgaagaaaaggacagagaattggttccatttcttcttgattttaaggcatccctcgacaaaatattggaagaaagttttgccaagaacgaggctttctccaataccataaaagattcatttgagcaccttatcaatctacgacagaaccgacctgcggaattgattgcaaagtttcttgacgagaaacttcgagctggcaataaagggacatcggaagaagagctggagggtatacttgataaagttctggtcctgtttcggtttatacaaggtaaagatgtatttgaggcattctacaagaaggatctagctaagaggttgctgcttgggaagagtgcatcaatagatgctgaaaaatcgatgatcacgaaactcaaaactgagtgtggaagtcagtttaccaacaagctggagggaatgttcaaggacattgaattatccaaagaaataaatgattcattcagacaatcatctcaagctaggacaaagcttccctctggcattgaaatgagtgtccatgtgcttacaacaggctattggcctacatatccaccaatggacgtgaaactcccacacgaactgaatgtgtatcaggatatatttaaagagttctatttgagcaagtacagtggaaggcgtttaatgtggcagaattctttgggacactgtgtcttgaaagcagactttcccaaaggcaaaaaggaactcgcggtgtcattgtttcagagtgtggttttgatgttgttcaatgacgcacaaaaattaagcttccttgacatcaaagattccactggtatcgaggataaagaattgagacggacactgcaatcgcttgcatgtggtaaagttcgggttctccaaaagataccaaaagggagagatgtagaagataaggatgactttgtattcaatgaagattttagtgctcccctctatcgcataaaggtaaatgcaattcaaatgaaggagacggtagaagaaaacacgagcaccactgagagagtgttccaggatcggcagtatcaggttgatgcggccatagttcgaataatgaagacgcggaaggtcctgagccacacccttctaataaccgagctttaccagcagcttaagttccctgttaagccagctgatatcaagaaaagaatagagagcttaatagaccgggagtacctggagcgggacaggagtaacccccagatctacaactatctggcttga

SEQ ID NO: 13924 - protein, 832 aa, Zea mays
MSQPHAAAPASKRPFSSTTTSPSPTSSPATPLMKKAKHPAATASSVGTVEKNGIHLDTAAAAATGGGRTNGEEDAEMVLVDQDELPAPSAPASAGVAANLFRKKATLPQPSTSARKPLRIRIGQPKLPKNFEEDTWTILKDAITAIFLKQKLSCDVEKLYQAAGDLCLHKLGANLYERIKKECEIHIAEKISALVGQSPDLVVFLSLVQRTWQDFCDQMLIIRGIALLLDVKYVKNVANICSVWDMGLQLFRKHLSLSPEIEHKTVTGLLRLIESERLGEAIDRTLLSHLLKMLTALGMYSESFEKPFLECTSEFYATEGVKYMQQSDIPDYLKHVESRLQEEHERCILYLEANTRKPLIATTEKQLLERHTSAIIEKGFTMLMDANRINDLSRMYNLFQRVNAVELLKLALSSYIRATGQGIIMDEEKDRELVPFLLDFKASLDKILEESFAKNEAFSNTIKDSFEHLINLRQNRPAELIAKFLDEKLRAGNKGTSEEELEGILDKVLVLFRFIQGKDVFEAFYKKDLAKRLLLGKSASIDAEKSMITKLKTECGSQFTNKLEGMFKDIELSKEINDSFRQSSQARTKLPSGIEMSVHVLTTGYWPTYPPMDVKLPHELNVYQDIFKEFYLSKYSGRRLMWQNSLGHCVLKADFPKGKKELAVSLFQSVVLMLFNDAQKLSFLDIKDSTGIEDKELRRTLQSLACGKVRVLQKIPKGRDVEDKDDFVFNEDFSAPLYRIKVNAIQMKETVEENTSTTERVFQDRQYQVDAAIVRIMKTRKVLSHTLLITELYQQLKFPVKPADIKKRIESLIDREYLERDRSNPQIYNYLA

SEQ ID NO: 13925 - DNA, 20 bp, Artificial sequence
  primer
atggcagggcaggagcgtag

SEQ ID NO: 13926 - DNA, 20 bp, Artificial sequence
  primer
tcaggcaaggtatttgtacg

SEQ ID NO: 13927 - protein, 1039 aa, Artificial sequence
  consensus sequence
  Variant (2)..(30): Xaa in position 2 to 30 is any amino acid
  Variant (31)..(106): Xaa in position 31 to 106 is any or no amino acid
  Variant (108)..(126): Xaa in position 108 to 126 is any amino acid
  Variant (127)..(173): Xaa in position 127 to 173 is any or no amino acid
  Variant (175)..(179): Xaa in position 175 to 179 is any amino acid
  Variant (180)..(180): Xaa in position 180 is any or no amino acid
  Variant (182)..(183): Xaa in position 182 to 183 is any amino acid
  Variant (184)..(211): Xaa in position 184 to 211 is any or no amino acid
  Variant (213)..(213): Xaa in position 213 is any amino acid
  Variant (216)..(229): Xaa in position 216 to 229 is any amino acid
  Variant (230)..(236): Xaa in position 230 to 236 is any or no amino acid
  Variant (238)..(240): Xaa in position 238 to 240 is any amino acid
  Variant (242)..(260): Xaa in position 242 to 260 is any amino acid
  Variant (261)..(277): Xaa in position 261 to 277 is any or no amino acid
  Variant (279)..(279): Xaa in position 279 is any amino acid
  Variant (281)..(286): Xaa in position 281 to 286 is any amino acid
  Variant (287)..(289): Xaa in position 287 to 289 is any or no amino acid
  Variant (291)..(293): Xaa in position 291 to 293 is any amino acid
  Variant (294)..(321): Xaa in position 294 to 321 is any or no amino acid
  Variant (324)..(326): Xaa in position 324 to 326 is any amino acid
  Variant (328)..(333): Xaa in position 328 to 333 is any amino acid
  Variant (335)..(348): Xaa in position 335 to 348 is any amino acid
  Variant (349)..(349): Xaa in position 349 is any or no amino acid
  Variant (351)..(353): Xaa in position 351 to 353 is any amino acid
  Variant (354)..(357): Xaa in position 354 to 357 is any or no amino acid
  Variant (359)..(359): Xaa in position 359 is any amino acid
  Variant (360)..(360): Xaa in position 360 is any or no amino acid
  Variant (362)..(363): Xaa in position 362 to 363 is any amino acid
  Variant (365)..(365): Xaa in position 365 is any amino acid
  Variant (366)..(367): Xaa in position 366 to 367 is any or no amino acid
  Variant (369)..(371): Xaa in position 369 to 371 is any amino acid
  Variant (372)..(385): Xaa in position 372 to 385 is any or no amino acid
  Variant (387)..(401): Xaa in position 387 to 401 is any amino acid
  Variant (402)..(405): Xaa in position 402 to 405 is any or no amino acid
  Variant (407)..(412): Xaa in position 407 to 412 is any amino acid
  Variant (415)..(417): Xaa in position 415 to 417 is any amino acid
  Variant (419)..(419): Xaa in position 419 is any amino acid
  Variant (421)..(434): Xaa in position 421 to 434 is any amino acid
  Variant (435)..(443): Xaa in position 435 to 443 is any or no amino acid
  Variant (445)..(457): Xaa in position 445 to 457 is any amino acid
  Variant (458)..(497): Xaa in position 458 to 497 is any or no amino acid
  Variant (499)..(502): Xaa in position 499 to 502 is any amino acid
  Variant (503)..(515): Xaa in position 503 to 515 is any or no amino acid
  Variant (517)..(520): Xaa in position 517 to 520 is any amino acid
  Variant (521)..(527): Xaa in position 521 to 527 is any or no amino acid
  Variant (529)..(535): Xaa in position 529 to 535 is any amino acid
  Variant (537)..(538): Xaa in position 537 to 538 is any amino acid
  Variant (540)..(540): Xaa in position 540 is any amino acid
  Variant (542)..(547): Xaa in position 542 to 547 is any amino acid
  Variant (548)..(561): Xaa in position 548 to 561 is any or no amino acid
  Variant (563)..(568): Xaa in position 563 to 568 is any amino acid
  Variant (570)..(571): Xaa in position 570 to 571 is any amino acid
  Variant (573)..(583): Xaa in position 573 to 583 is any amino acid
  Variant (584)..(610): Xaa in position 584 to 610 is any or no amino acid
  Variant (612)..(612): Xaa in position 612 is any amino acid
  Variant (613)..(613): Xaa in position 613 is any or no amino acid
  Variant (615)..(617): Xaa in position 615 to 617 is any amino acid
  Variant (618)..(626): Xaa in position 618 to 626 is any or no amino acid
  Variant (629)..(629): Xaa in position 629 is any amino acid
  Variant (631)..(633): Xaa in position 631 to 633 is any amino acid
  Variant (635)..(635): Xaa in position 635 is any amino acid
  Variant (636)..(637): Xaa in position 636 to 637 is any or no amino acid
  Variant (640)..(640): Xaa in position 640 is any amino acid
  Variant (643)..(646): Xaa in position 643 to 646 is any amino acid
  Variant (648)..(648): Xaa in position 648 is any amino acid
  Variant (649)..(652): Xaa in position 649 to 652 is any or no amino acid
  Variant (654)..(658): Xaa in position 654 to 658 is any amino acid
  Variant (662)..(663): Xaa in position 662 to 663 is any amino acid
  Variant (666)..(667): Xaa in position 666 to 667 is any amino acid
  Variant (668)..(683): Xaa in position 668 to 683 is any or no amino acid
  Variant (686)..(686): Xaa in position 686 is any amino acid
  Variant (688)..(688): Xaa in position 688 is any amino acid
  Variant (690)..(690): Xaa in position 690 is any amino acid
  Variant (692)..(693): Xaa in position 692 to 693 is any amino acid
  Variant (694)..(694): Xaa in position 694 is any or no amino acid
  Variant (696)..(722): Xaa in position 696 to 722 is any amino acid
  Variant (723)..(733): Xaa in position 723 to 733 is any or no amino acid
  Variant (735)..(736): Xaa in position 735 to 736 is any amino acid
  Variant (738)..(738): Xaa in position 738 is any amino acid
  Variant (741)..(749): Xaa in position 741 to 749 is any amino acid
  Variant (750)..(763): Xaa in position 750 to 763 is any or no amino acid
  Variant (765)..(773): Xaa in position 765 to 773 is any amino acid
  Variant (775)..(777): Xaa in position 775 to 777 is any amino acid
  Variant (779)..(784): Xaa in position 779 to 784 is any amino acid
  Variant (785)..(785): Xaa in position 785 is any or no amino acid
  Variant (787)..(787): Xaa in position 787 is any amino acid
  Variant (789)..(789): Xaa in position 789 is any amino acid
  Variant (791)..(795): Xaa in position 791 to 795 is any amino acid
  Variant (796)..(802): Xaa in position 796 to 802 is any or no amino acid
  Variant (804)..(809): Xaa in position 804 to 809 is any amino acid
  Variant (810)..(844): Xaa in position 810 to 844 is any or no amino acid
  Variant (846)..(846): Xaa in position 846 is any amino acid
  Variant (848)..(849): Xaa in position 848 to 849 is any amino acid
  Variant (850)..(850): Xaa in position 850 is any or no amino acid
  Variant (852)..(854): Xaa in position 852 to 854 is any amino acid
  Variant (856)..(856): Xaa in position 856 is any amino acid
  Variant (860)..(863): Xaa in position 860 to 863 is any amino acid
  Variant (864)..(866): Xaa in position 864 to 866 is any or no amino acid
  Variant (868)..(871): Xaa in position 868 to 871 is any amino acid
  Variant (873)..(884): Xaa in position 873 to 884 is any amino acid
  Variant (885)..(885): Xaa in position 885 is any or no amino acid
  Variant (887)..(887): Xaa in position 887 is any amino acid
  Variant (889)..(890): Xaa in position 889 to 890 is any amino acid
  Variant (892)..(894): Xaa in position 892 to 894 is any amino acid
  Variant (896)..(904): Xaa in position 896 to 904 is any amino acid
  Variant (905)..(917): Xaa in position 905 to 917 is any or no amino acid
  Variant (919)..(920): Xaa in position 919 to 920 is any amino acid
  Variant (922)..(923): Xaa in position 922 to 923 is any amino acid
  Variant (924)..(931): Xaa in position 924 to 931 is any or no amino acid
  Variant (933)..(947): Xaa in position 933 to 947 is any amino acid
  Variant (948)..(955): Xaa in position 948 to 955 is any or no amino acid
  Variant (957)..(966): Xaa in position 957 to 966 is any amino acid
  Variant (969)..(973): Xaa in position 969 to 973 is any amino acid
  Variant (975)..(975): Xaa in position 975 is any amino acid
  Variant (982)..(982): Xaa in position 982 is any amino acid
  Variant (985)..(987): Xaa in position 985 to 987 is any amino acid
  Variant (989)..(990): Xaa in position 989 to 990 is any amino acid
  Variant (992)..(993): Xaa in position 992 to 993 is any amino acid
  Variant (995)..(997): Xaa in position 995 to 997 is any amino acid
  Variant (1000)..(1007): Xaa in position 1000 to 1007 is any amino acid
  Variant (1008)..(1009): Xaa in position 1008 to 1009 is any or no amino acid
  Variant (1013)..(1013): Xaa in position 1013 is any amino acid
  Variant (1016)..(1016): Xaa in position 1016 is any amino acid
  Variant (1019)..(1021): Xaa in position 1019 to 1021 is any amino acid
  Variant (1023)..(1023): Xaa in position 1023 is any amino acid
  Variant (1026)..(1031): Xaa in position 1026 to 1031 is any amino acid
  Variant (1032)..(1036): Xaa in position 1032 to 1036 is any or no amino acid
  Variant (1038)..(1038): Xaa in position 1038 is any amino acid
LXXXXXXXXXXXXXXXXXXXXXXXXXXXXXXXXXXXXXXXXXXXXXXXXXXXXXXXXXXXXXXXXXXXXXXXXXXXXXXXXXXXXXXXXXXXXXXXXXXXXXXXXXLXXXXXXXXXXXXXXXXXXXXXXXXXXXXXXXXXXXXXXXXXXXXXXXXXXXXXXXXXXXXXXXXXXLXXXXXXWXXXXXXXXXXXXXXXXXXXXXXXXXXXXXXYXDRXXXXXXXXXXXXXXXXXXXXXLXXXRXXXXXXXXXXXXXXXXXXXXXXXXXXXXXXXXXXXXRXGXXXXXXXXXLXXXXXXXXXXXXXXXXXXXXXXXXXXXXXXXFEXXXLXXXXXXYXXXXXXXXXXXXXXXYXXXXXXXLXXEXXRXXXYXXXXXXXXXXXXXXXXXLXXXXXXXXXXXXXXXXXXXLXXXXXXDLXXXYXLXXXXXXXXXXXXXXXXXXXXXXXGXXXXXXXXXXXXXXXXXXXXXXXXXXXXXXXXXXXXXXXXXXXXXXXXXXXXXVXXXXXXXXXXXXXXXXXFXXXXXXXXXXXFXXXXXXXFXXFXNXXXXXXXXXXXXXXXXXXXXEXXXXXXDXXLXXXXXXXXXXXXXXXXXXXXXXXXXXXXXXXXXXXXXXEXXLXXXXXXXXXXXXKDXFXXXYXXXLAXRLXXXXSXXXXXEXXXXXKLKXXCGXXXXXXXXXXXXXXXXXXFTXKXEXMXXXDXXXXXXXXXXXXXXXXXXXXXXXXXXXXXXXXXXXXXXLXXGXWPXXXXXXXXXXXXXXXXXXXXXXXPXXXXXXXXXFXXXYXXXXXXXRXLXWXXXXXXXXXXXXFXXXXXXXXXXXXXXXXXXXXXXXXXXXXXXXXXXXXXXXXXLXVXXXQXXXLXLFNXXXXXXXLXXXXIXXXXXXXXXXXXXRXLXXLXXXKXXXXXXXXXXXXXXXXXXXXXXFXXNXXXXXXXXXXFXXXXXXXXXXXXXXXXXXXXXXXEXXXXXXXXXXDRXXXXXAXIVRIMKXRKXXXHXXLXXEXXXQLXXXXXXXXXXIKKXIEXLIXXXYXERXXXXXXXXXXXYXA

SEQ ID NO: 13928 - protein, 29 aa, Artificial sequence
  protein pattern
  Variant (2)..(2): Xaa in position 2 is any amino acid
  Variant (3)..(3): Xaa in position 3 is Asn or Ser
  Variant (4)..(4): Xaa in position 4 is Ile, Leu or Met
  Variant (5)..(5): Xaa in position 5 is Ile or Leu
  Variant (6)..(6): Xaa in position 6 is Ala, Ser, Thr or Val
  Variant (7)..(7): Xaa in position 7 is Lys or Arg
  Variant (10)..(11): Xaa in position 10 to 11 is any amino acid
  Variant (14)..(15): Xaa in position 14 to 15 is any or no amino acid
  Variant (17)..(18): Xaa in position 17 to 18 is any or no amino acid
  Variant (20)..(21): Xaa in position 20 to 21 is any amino acid
  Variant (22)..(22): Xaa in position 22 is Leu or Met
  Variant (23)..(23): Xaa in position 23 is Glu or Gln
  Variant (24)..(24): Xaa in position 24 is any amino acid
  Variant (26)..(26): Xaa in position 26 is Phe, Ile, Leu or Val
  Variant (27)..(27): Xaa in position 27 is any amino acid
  Variant (29)..(29): Xaa in position 29 is Ile, Leu, Met or Val
EXXXXXXLKXXCGXXFXXTXXXXXMXXDX

SEQ ID NO: 13929 - protein, 28 aa, Artificial sequence
  protein pattern
  Variant (2)..(6): Xaa in position 2 to 6 is any amino acid
  Variant (7)..(7): Xaa in position 7 is any or no amino acid
  Variant (9)..(9): Xaa in position 9 is any amino acid
  Variant (10)..(10): Xaa in position 10 is any or no amino acid
  Variant (16)..(16): Xaa in position 16 is any amino acid
  Variant (18)..(18): Xaa in position 18 is Lys or Arg
  Variant (19)..(19): Xaa in position 19 is any amino acid
  Variant (20)..(20): Xaa in position 20 is Ile, Leu or Met
  Variant (21)..(21): Xaa in position 21 is any amino acid
  Variant (23)..(24): Xaa in position 23 to 24 is any amino acid
  Variant (25)..(25): Xaa in position 25 is Ile or Leu
  Variant (26)..(26): Xaa in position 26 is Ile, Leu, Met or Val
  Variant (27)..(27): Xaa in position 27 is any amino acid
  Variant (28)..(28): Xaa in position 28 is Asp or Glu
RXXXXXXAXXVRIMKXRXXXXHXXXXXX

SEQ ID NO: 13930 - protein, 29 aa, Artificial sequence
  protein pattern
  Variant (2)..(13): Xaa in position 2 to 13 is any amino acid
  Variant (16)..(16): Xaa in position 16 is Leu or Val
  Variant (18)..(18): Xaa in position 18 is Ala, Glu or Gln
  Variant (19)..(19): Xaa in position 19 is any amino acid
  Variant (20)..(20): Xaa in position 20 is Phe or Tyr
  Variant (22)..(24): Xaa in position 22 to 24 is any amino acid
  Variant (26)..(26): Xaa in position 26 is Ala, Gly or Ser
  Variant (27)..(27): Xaa in position 27 is Lys or Arg
LXXXXXXXXXXXXKDXFXXXYXXXLXXRL

SEQ ID NO: 13931 - protein, 21 aa, Artificial sequence
  protein pattern
  Variant (2)..(5): Xaa in position 2 to 5 is any amino acid
  Variant (6)..(6): Xaa in position 6 is any or no amino acid
  Variant (8)..(8): Xaa in position 8 is any amino acid
  Variant (9)..(9): Xaa in position 9 is any or no amino acid
  Variant (11)..(11): Xaa in position 11 is Asp or Glu
  Variant (12)..(12): Xaa in position 12 is any amino acid
  Variant (14)..(14): Xaa in position 14 is Ile, Leu or Met
  Variant (15)..(15): Xaa in position 15 is Ala, Asp, Glu, Asn, Ser or Thr
  Variant (16)..(16): Xaa in position 16 is Lys or Arg
  Variant (17)..(17): Xaa in position 17 is Asp or Glu
  Variant (18)..(18): Xaa in position 18 is Phe or Tyr
  Variant (19)..(19): Xaa in position 19 is Ile, Leu or Met
PXXXXXKXXIXXLXXXXXXER

SEQ ID NO: 13932 - protein, 27 aa, Artificial sequence
  protein pattern
  Variant (2)..(3): Xaa in position 2 to 3 is any amino acid
  Variant (4)..(4): Xaa in position 4 is Phe or Tyr
  Variant (6)..(11): Xaa in position 6 to 11 is any amino acid
  Variant (13)..(13): Xaa in position 13 is Lys or Arg
  Variant (15)..(15): Xaa in position 15 is any amino acid
  Variant (17)..(18): Xaa in position 17 to 18 is any amino acid
  Variant (19)..(19): Xaa in position 19 is Gly, Asn, Gln, Ser or Thr
  Variant (20)..(20): Xaa in position 20 is any amino acid
  Variant (21)..(21): Xaa in position 21 is Ala, Cys, Gly or Ser
  Variant (22)..(22): Xaa in position 22 is any amino acid
  Variant (23)..(23): Xaa in position 23 is Ala, Cys, Gly, Asn, Ser or Val
  Variant (24)..(24): Xaa in position 24 is any amino acid
  Variant (25)..(25): Xaa in position 25 is Ile, Leu, Met or Val
  Variant (26)..(26): Xaa in position 26 is any amino acid
  Variant (27)..(27): Xaa in position 27 is Ala, Cys, Gly, Ser, Thr or Val
FXXXYXXXXXXRXLXWXXXXXXXXXXX

SEQ ID NO: 13933 - DNA, 9506 bp, Artificial sequence
  plasmid used for non-targeted expression of OS02G44730
  CDS (1973)..(2608): OS02G44730
agcttggacaatcagtaaattgaacggagaatattattcataaaaatacgatagtaacgggtgatatattcattagaatgaaccgaaaccggcggtaaggatctgagctacacatgctcaggttttttacaacgtgcacaacagaattgaaagcaaatatcatgcgatcataggcgtctcgcatatctcattaaagcagggcatgccggtcgagtcaaatctcggtgacgggcaggaccggacggggcggtaccggcaggctgaagtccagctgccagaaacccacgtcatgccagttcccgtgcttgaagccggccgcccgcagcatgccgcggggggcatatccgagcgcctcgtgcatgcgcacgctcgggtcgttgggcagcccgatgacagcgaccacgctcttgaagccctgtgcctccagggacttcagcaggtgggtgtagagcgtggagcccagtcccgtccgctggtggcggggggagacgtacacggtcgactcggccgtccagtcgtaggcgttgcgtgccttccaggggcccgcgtaggcgatgccggcgacctcgccgtccacctcggcgacgagccagggatagcgctcccgcagacggacgaggtcgtccgtccactcctgcggttcctgcggctcggtacggaagttgaccgtgcttgtctcgatgtagtggttgacgatggtgcagaccgccggcatgtccgcctcggtggcacggcggatgtcggccgggcgtcgttctgggctcatggtagactcgacggatccacgtgtggaagatatgaatttttttgagaaactagataagattaatgaatatcggtgttttggttttttcttgtggccgtctttgtttatattgagatttttcaaatcagtgcgcaagacgtgacgtaagtatccgagtcagtttttatttttctactaatttggtcgaagctttgggcggatcctctagaattcgaatccaaaaattacggatatgaatataggcatatccgtatccgaattatccgtttgacagctagcaacgattgtacaattgcttctttaaaaaaggaagaaagaaagaaagaaaagaatcaacatcagcgttaacaaacggccccgttacggcccaaacggtcatatagagtaacggcgttaagcgttgaaagactcctatcgaaatacgtaaccgcaaacgtgtcatagtcagatcccctcttccttcaccgcctcaaacacaaaaataatcttctacagcctatatatacaacccccccttctatctctcctttctcacaattcatcatctttctttctctacccccaattttaagaaatcctctcttctcctcttcattttcaaggtaaatctctctctctctctctctctctgttattccttgttttaattaggtatgtattattgctagtttgttaatctgcttatcttatgtatgccttatgtgaatatctttatcttgttcatctcatccgtttagaagctataaatttgttgatttgactgtgtatctacacgtggttatgtttatatctaatcagatatgaatttcttcatattgttgcgtttgtgtgtaccaatccgaaatcgttgatttttttcatttaatcgtgtagctaattgtacgtatacatatggatctacgtatcaattgttcatctgtttgtgtttgtatgtatacagatctgaaaacatcacttctctcatctgattgtgttgttacatacatagatatagatctgttatatcattttttttattaattgtgtatatatatatgtgcatagatctggattacatgattgtgattatttacatgattttgttatttacgtatgtatatatgtagatctggactttttggagttgttgacttgattgtatttgtgtgtgtatatgtgtgttctgatcttgatatgttatgtatgtgcagcccgggttgctcttccatggtttcgcttctcactggcagtttgaccctgtcaggggcagcaattgttaccttcttttacagtcttggggaacatgggcttcagactgcattactgtactacctgaaggcacagtttggttacagcaaagatgagttcgctaatcttctgttaattgctggtgctgcaggaatgctgtcacagctgactgtaatgccggtcttggctcgatttgttggcgaggatatactgcttattataggactcctaggaggatgtactcatgttttcctgtatggcattgcatggtcatattgggtaccatatttatctgcggtgtttataattctgagtgcttttgttcacccttctataagaaccaatgtatcgaagagtgttggatcaaatgagcagggaattgctcaaggctgtatatcgggcataagctcgtttgccagcatattagctccactaatttttacccctctaacagcatgggtcctttcagaaacagcgccattcaaattcaaaggtttcagtatcatgtgtgctggcttttgtacgctcattgccttcattatcagcatgaggatgcgagcagggcaatctggtgcaagtgagatgttggccattgtgcagcatgagcaagcatgataacgaagagcaagagctcgaatttccccgatcgttcaaacatttggcaataaagtttcttaagattgaatcctgttgccggtcttgcgatgattatcatataatttctgttgaattacgttaagcatgtaataattaacatgtaatgcatgacgttatttatgagatgggtttttatgattagagtcccgcaattatacatttaatacgcgatagaaaacaaaatatagcgcgcaaactaggataaattatcgcgcgcggtgtcatctatgttactagatcgggaattggcatgcaagcttggcactggccgtcgttttacaacgtcgtgactgggaaaaccctggcgttacccaacttaatcgccttgcagcacatccccctttcgccagctggcgtaatagcgaagaggcccgcaccgatcgcccttcccaacagttgcgcagcctgaatggcgaatgctagagcagcttgagcttggatcagattgtcgtttcccgccttcagtttaaactatcagtgtttgacaggatatattggcgggtaaacctaagagaaaagagcgtttattagaataatcggatatttaaaagggcgtgaaaaggtttatccgttcgtccatttgtatgtgcatgccaaccacagggttcccctcgggatcaaagtactttgatccaacccctccgctgctatagtgcagtcggcttctgacgttcagtgcagccgtcttctgaaaacgacatgtcgcacaagtcctaagttacgcgacaggctgccgccctgcccttttcctggcgttttcttgtcgcgtgttttagtcgcataaagtagaatacttgcgactagaaccggagacattacgccatgaacaagagcgccgccgctggcctgctgggctatgcccgcgtcagcaccgacgaccaggacttgaccaaccaacgggccgaactgcacgcggccggctgcaccaagctgttttccgagaagatcaccggcaccaggcgcgaccgcccggagctggccaggatgcttgaccacctacgccctggcgacgttgtgacagtgaccaggctagaccgcctggcccgcagcacccgcgacctactggacattgccgagcgcatccaggaggccggcgcgggcctgcgtagcctggcagagccgtgggccgacaccaccacgccggccggccgcatggtgttgaccgtgttcgccggcattgccgagttcgagcgttccctaatcatcgaccgcacccggagcgggcgcgaggccgccaaggcccgaggcgtgaagtttggcccccgccctaccctcaccccggcacagatcgcgcacgcccgcgagctgatcgaccaggaaggccgcaccgtgaaagaggcggctgcactgcttggcgtgcatcgctcgaccctgtaccgcgcacttgagcgcagcgaggaagtgacgcccaccgaggccaggcggcgcggtgccttccgtgaggacgcattgaccgaggccgacgccctggcggccgccgagaatgaacgccaagaggaacaagcatgaaaccgcaccaggacggccaggacgaaccgtttttcattaccgaagagatcgaggcggagatgatcgcggccgggtacgtgttcgagccgcccgcgcacgtctcaaccgtgcggctgcatgaaatcctggccggtttgtctgatgccaagctggcggcctggccggccagcttggccgctgaagaaaccgagcgccgccgtctaaaaaggtgatgtgtatttgagtaaaacagcttgcgtcatgcggtcgctgcgtatatgatgcgatgagtaaataaacaaatacgcaaggggaacgcatgaaggttatcgctgtacttaaccagaaaggcgggtcaggcaagacgaccatcgcaacccatctagcccgcgccctgcaactcgccggggccgatgttctgttagtcgattccgatccccagggcagtgcccgcgattgggcggccgtgcgggaagatcaaccgctaaccgttgtcggcatcgaccgcccgacgattgaccgcgacgtgaaggccatcggccggcgcgacttcgtagtgatcgacggagcgccccaggcggcggacttggctgtgtccgcgatcaaggcagccgacttcgtgctgattccggtgcagccaagcccttacgacatatgggccaccgccgacctggtggagctggttaagcagcgcattgaggtcacggatggaaggctacaagcggcctttgtcgtgtcgcgggcgatcaaaggcacgcgcatcggcggtgaggttgccgaggcgctggccgggtacgagctgcccattcttgagtcccgtatcacgcagcgcgtgagctacccaggcactgccgccgccggcacaaccgttcttgaatcagaacccgagggcgacgctgcccgcgaggtccaggcgctggccgctgaaattaaatcaaaactcatttgagttaatgaggtaaagagaaaatgagcaaaagcacaaacacgctaagtgccggccgtccgagcgcacgcagcagcaaggctgcaacgttggccagcctggcagacacgccagccatgaagcgggtcaactttcagttgccggcggaggatcacaccaagctgaagatgtacgcggtacgccaaggcaagaccattaccgagctgctatctgaatacatcgcgcagctaccagagtaaatgagcaaatgaataaatgagtagatgaattttagcggctaaaggaggcggcatggaaaatcaagaacaaccaggcaccgacgccgtggaatgccccatgtgtggaggaacgggcggttggccaggcgtaagcggctgggttgcctgccggccctgcaatggcactggaacccccaagcccgaggaatcggcgtgagcggtcgcaaaccatccggcccggtacaaatcggcgcggcgctgggtgatgacctggtggagaagttgaaggccgcgcaggccgcccagcggcaacgcatcgaggcagaagcacgccccggtgaatcgtggcaagcggccgctgatcgaatccgcaaagaatcccggcaaccgccggcagccggtgcgccgtcgattaggaagccgcccaagggcgacgagcaaccagattttttcgttccgatgctctatgacgtgggcacccgcgatagtcgcagcatcatggacgtggccgttttccgtctgtcgaagcgtgaccgacgagctggcgaggtgatccgctacgagcttccagacgggcacgtagaggtttccgcagggccggccggcatggccagtgtgtgggattacgacctggtactgatggcggtttcccatctaaccgaatccatgaaccgataccgggaagggaagggagacaagcccggccgcgtgttccgtccacacgttgcggacgtactcaagttctgccggcgagccgatggcggaaagcagaaagacgacctggtagaaacctgcattcggttaaacaccacgcacgttgccatgcagcgtacgaagaaggccaagaacggccgcctggtgacggtatccgagggtgaagccttgattagccgctacaagatcgtaaagagcgaaaccgggcggccggagtacatcgagatcgagctagctgattggatgtaccgcgagatcacagaaggcaagaacccggacgtgctgacggttcaccccgattactttttgatcgatcccggcatcggccgttttctctaccgcctggcacgccgcgccgcaggcaaggcagaagccagatggttgttcaagacgatctacgaacgcagtggcagcgccggagagttcaagaagttctgtttcaccgtgcgcaagctgatcgggtcaaatgacctgccggagtacgatttgaaggaggaggcggggcaggctggcccgatcctagtcatgcgctaccgcaacctgatcgagggcgaagcatccgccggttcctaatgtacggagcagatgctagggcaaattgccctagcaggggaaaaaggtcgaaaaggtctctttcctgtggatagcacgtacattgggaacccaaagccgtacattgggaaccggaacccgtacattgggaacccaaagccgtacattgggaaccggtcacacatgtaagtgactgatataaaagagaaaaaaggcgatttttccgcctaaaactctttaaaacttattaaaactcttaaaacccgcctggcctgtgcataactgtctggccagcgcacagccgaagagctgcaaaaagcgcctacccttcggtcgctgcgctccctacgccccgccgcttcgcgtcggcctatcgcggccgctggccgctcaaaaatggctggcctacggccaggcaatctaccagggcgcggacaagccgcgccgtcgccactcgaccgccggcgcccacatcaaggcaccctgcctcgcgcgtttcggtgatgacggtgaaaacctctgacacatgcagctcccggagacggtcacagcttgtctgtaagcggatgccgggagcagacaagcccgtcagggcgcgtcagcgggtgttggcgggtgtcggggcgcagccatgacccagtcacgtagcgatagcggagtgtatactggcttaactatgcggcatcagagcagattgtactgagagtgcaccatatgcggtgtgaaataccgcacagatgcgtaaggagaaaataccgcatcaggcgctcttccgcttcctcgctcactgactcgctgcgctcggtcgttcggctgcggcgagcggtatcagctcactcaaaggcggtaatacggttatccacagaatcaggggataacgcaggaaagaacatgtgagcaaaaggccagcaaaaggccaggaaccgtaaaaaggccgcgttgctggcgtttttccataggctccgcccccctgacgagcatcacaaaaatcgacgctcaagtcagaggtggcgaaacccgacaggactataaagataccaggcgtttccccctggaagctccctcgtgcgctctcctgttccgaccctgccgcttaccggatacctgtccgcctttctcccttcgggaagcgtggcgctttctcatagctcacgctgtaggtatctcagttcggtgtaggtcgttcgctccaagctgggctgtgtgcacgaaccccccgttcagcccgaccgctgcgccttatccggtaactatcgtcttgagtccaacccggtaagacacgacttatcgccactggcagcagccactggtaacaggattagcagagcgaggtatgtaggcggtgctacagagttcttgaagtggtggcctaactacggctacactagaaggacagtatttggtatctgcgctctgctgaagccagttaccttcggaaaaagagttggtagctcttgatccggcaaacaaaccaccgctggtagcggtggtttttttgtttgcaagcagcagattacgcgcagaaaaaaaggatctcaagaagatcctttgatcttttctacggggtctgacgctcagtggaacgaaaactcacgttaagggattttggtcatgcattctaggtactaaaacaattcatccagtaaaatataatattttattttctcccaatcaggcttgatccccagtaagtcaaaaaatagctcgacatactgttcttccccgatatcctccctgatcgaccggacgcagaaggcaatgtcataccacttgtccgccctgccgcttctcccaagatcaataaagccacttactttgccatctttcacaaagatgttgctgtctcccaggtcgccgtgggaaaagacaagttcctcttcgggcttttccgtctttaaaaaatcatacagctcgcgcggatctttaaatggagtgtcttcttcccagttttcgcaatccacatcggccagatcgttattcagtaagtaatccaattcggctaagcggctgtctaagctattcgtatagggacaatccgatatgtcgatggagtgaaagagcctgatgcactccgcatacagctcgataatcttttcagggctttgttcatcttcatactcttccgagcaaaggacgccatcggcctcactcatgagcagattgctccagccatcatgccgttcaaagtgcaggacctttggaacaggcagctttccttccagccatagcatcatgtccttttcccgttccacatcataggtggtccctttataccggctgtccgtcatttttaaatataggttttcattttctcccaccagcttatataccttagcaggagacattccttccgtatcttttacgcagcggtatttttcgatcagttttttcaattccggtgatattctcattttagccatttattatttccttcctcttttctacagtatttaaagataccccaagaagctaattataacaagacgaactccaattcactgttccttgcattctaaaaccttaaataccagaaaacagctttttcaaagttgttttcaaagttggcgtataacatagtatcgacggagccgattttgaaaccgcggtgatcacaggcagcaacgctctgtcatcgttacaatcaacatgctaccctccgcgagatcatccgtgtttcaaacccggcagcttagttgccgttcttccgaatagcatcggtaacatgagcaaagtctgccgccttacaacggctctcccgctgacgccgtcccggactgatgggctgcctgtatcgagtggtgattttgtgccgagctgccggtcggggagctgttggctggctggtggcaggatatattgtggtgtaaacaaattgacgcttagacaacttaataacacattgcggacgtttttaatgtactgaattaacgccgaatta

SEQ ID NO: 13934 - protein, 211 aa, Artificial sequence; identical to SEQ ID NO: 13502
  Synthetic Construct
